United States Patent Application Publication US 2024/0050491 A1 - sequence listing, part 3

SEQ ID NO: 20 - DNA, 4150193 bp, Bacillus velezensis (residues 1-2,075,097 of 4,150,193)
  source 1..4150193: mol_type = genomic DNA
atggagaatatattggatctttggaatcaagctctagctcaaattgagaaaaagctaagcaaaccgagtttcgaaacttggatgaagtcgacgaaagcccattcgctgcaaggggataccttaaccatcaccgctcccaatgaatttgccagagactggctggagtccaggtacttacatctcattgcagataccatatacgaattaaccggggaagaattgagcgtcaaatttgtcattcctcaaaatcaggacgaagaaaactttttaccgaaaccgcaagtgaaaaaagcggcaaaagaggaaccgtctgattttccccaaagcatgctcaacccgaaatatacattcgacacattcgtcatcggatcgggaaaccgattcgcccatgcagcatcactggctgtggcggaagcacccgctaaagcgtacaaccctttatttatatacgggggagtcggcttaggaaaaactcacttaatgcacgccatcggccattatgtcattgatcataatccttcagccaaagtggtgtacctgtcttctgaaaaattcacaaatgaattcatcaactcaatccgcgataataaagccgttgatttccgcaaccgctatcggaacgttgatgtacttttgatagatgatattcaatttttagccggaaaagaacaaacacaggaagagtttttccatacattcaacacgcttcatgaagaaagcaaacaaatcgtgatttccagcgacagaccgccgaaagagatcccgacccttgaagaccgcctgcgttcgcggttcgaatggggattgattacggatatcacaccgccggatctggaaacgcggattgccatcctgagaaaaaaagcgaaggcggaaggtcttgatattccgaacgaggtcatgctttacatcgcgaatcagattgacagcaacatccgcgaactggaaggggcattaatccgggttgtcgcctattcatccttaatcaataaagacattaacgcagacctggctgcagaagcattgaaagatattattccgtcttctaagccgaaggtcattacgataaaagagattcagcggattgtcggacagcagttcaacattaagcttgaagatttcaaagcgaaaaagcgcacgaaatccgtggcgttcccaagacaaattgcgatgtatctttcaagagaaatgacggattcttctttgcctaaaatcggggaagaatttggcggcagagaccatacaaccgtcattcacgcccatgaaaagatttcaaaactgctgattgatgacgagcagcttcagcagcaggtgaaagaaataaaagaactgcttaaataatagtgccctcggatgaatcggggaaagtgtgaataactttttcatagccatacacagtctgtccacatgtggataggctgtgtttcctgtctttttcacaacttatccacaaatccacaggccctactattactactgctatttttaaaatatattaattatattatccgttaggaggataaacatgaaatttacgattcaaaaagatcgtttagtcgaaagtgtacaagacgttctaaaagccgtttcatccagaaccacaattcccattctcaccggtattaagatcgtcgcctcagatgaaggagtatctttcacaggaagtgactctgatatttcaatcgagtcattcattccgaaagaagatgatgataaagaaatcgtgacgatcgatcagccgggaagtatcgtgctgcaagcgcgtttcttcagcgaaatcgttaaaaaactgccgatggcgactgttgaaatcgaagttcaaaatcaatatttaacgattatccgttccggaaaagccgaatttaatttaaacggcctagatgcagatgaatatccgcatctaccgcaaatcgaagagcatcacgccattcagattccgacggatcttttgaaaaacctcatccgccaaaccgtgttcgctgtgtccgcctcagaaacacgccctatcttgacaggtgtaaactggaaagtcgaaaacggtgaattattatgcactgccacggatagccaccggctcgctttaagaaaggcgaagcttgatattccggaagacagctcttataacgtggtcattcccgggaaaagcttaaccgagctgagcaaaattcttgatgacaaccaagaactggttgatatcgtgattacagaaacccaggttctgttcaaagcgaaaaacgtattgttcttctcaagattgcttgacggaaactatccggacacgaccagcttaattccgcaggaaagcaaaacggaaatcgtcgtgaacacgaaggaatttttacaggcgatagaccgtgcttctttattggcgagagaaggccgcaacaacgttgtaaagctttctgccaaaccggcggattcgctggaaatttcatcaaattctccggaaatcgggaaagtggtcgaagctgtgctggctgaccagattgacggcgaggaattaaatatttcattcagtccaaaatatatgatggacgcactgaaagtacttgaaggagcggacatccgtatcagctttacgggagcgatgagaccgtttcttatccgtacgccgaatgatgaaaccatcgttcagctcatccttccggtcagaacgtattaatcaaacagaatgtgctgccggcttagttcggcagcttttctattcatcagccgctccctcaagttttccctttccttatttcaggattttttagtacaattagatattagtgatatttgaaagaggtcgataatatggcaaatccgatttcgattgatacagaaatgattacgcttggccagtttttaaaattagccgatgtgattcagtccggcggcatggcgaagtggtttctgagcgagcatgaggtgactgtcaacaatgaacctgacaatcgccgcggcagaaagctttacgttggagacgtggtcgcgattgaaggatttggttcatttcaagtcgtcaattaaagcgggtgacagcggttgtatatccaaaatttagaattaacatcctaccgtaattatgagcgcgctgagcttcaattcgaaaacaaggtgaatgtgatcatcggggaaaatgcccaaggcaaaaccaatctgatggaagccatctatgtcctttcgatggcaaaatcacaccgcacctcaaatgacaaagaacttatacggtgggacgaagactatgctaaaatagaaggaagagtgatgaagcgaaacggggacatcccgatgcagcttgtcatctccaaaaaaggtaaaaagggcaaggtcaatcatatagagcagcaaaaactcagtcagtatgtcggagcgctgaacaccattatgtttgcccctgaggatttaaatctcgtcaaaggaagccctcaggtgaggaggagatttctcgatatggagatcgggcaggtttctgccgtttatctgtatgatttatctctttatcaaaaaatcctttcacagcggaatcattttctgaaacagctgcaaagccggaaacagactgaccggaccatgcttgacgttctcactgatcagctgattgaagcagccgcaaaagttgtcgccaaacgtctgcagtttacggcgcagcttgaaaaatgggcgcagccgatccattccggcatttcccggggacttgaagaactgacgcttaagtaccacacggcgcttgatgtatcagatcccaaagatttgtcgaaaataggtaacagctaccaggagtctttttcgaaattaaaagaaaaagaaatagaacgaggcgtcacattattcggaccgcatcgggatgatgtccttttttatgtgaacggacgcgatgtgcagacgtacggttcgcagggacagcagcgtacgacggctttgtctttgaagctggccgaaatagatttgattcatgaagaaatcggagaataccccattttacttttggatgatgtactaagcgagctggatgattaccgacagtcccatttgcttcatacgatccaaggccgtgtgcagacatttgtcaccacgacaagcgtggatggcattgaccacgataccttacatcaagcaggaatgttccgtgtggaaaacggtacgttagtgaagtgaagaaatgaggtgagcgattgtatattcatttaggtgacgactttgtcgtttcaacacgcgatatcgtcggcatttttgactgcaaggtcaatgtatcgccgatcgttgaagaatttctggacagacagaaagaaaaagtagtgccgtccgtaaacggcacgccaaagtctatcgtagtcacgactgagaatatatattactctcccttatcttccggcacactgaagaaacgtgcgcaatttatgttagaaatagattcttagcggatctttacaatgaatatatcgtttaagaaaagtgtaggtgaatgtgcatggctatggaacagcagcaaaatagttatgatgagaatcagatacaggtattagaaggtttggaagctgttcgaaagagaccggggatgtacatcggatcaactaacagcaaaggccttcaccacttggtgtgggaaatcgtcgacaacagtattgacgaagccctggccggttattgtacagatattaacatcgagattgaaaaagataacagcattaccgttaaggacaacgggcgcggaattccggtcggtatccaggagaagatgggccgccctgcggttgaagtcatcatgaccgttctccacgccggcggtaaatttgacggaagcggatataaagtatccggcggtcttcacggtgtaggggcatctgtcgtaaacgccttgtcgactactcttgacgttacggttcatcgtgacggaaaaatccactatcaggcgtacgagcgcggtgtacctgtggccgatcttgaagtgatcggtgatactgataagaccggaacgattacgcacttcgttccggatccggaaatcttcaaagaaacaaccgtatacgactatgatctgctttcaaaccgtgtccgggaattggccttcctgacaaaaggcgtaaacatcacgattgaagacaaacgtgaaggacaagaacggaaaaacgagtaccactacgaaggcggaatcaaaagctatgttgagtacttaaaccgttccaaagaagtcgttcatgaagagccgatttatatcgaaggcgagaaagacggcataacggttgaagttgcattgcaatacaacgacagctatacaagcaatatttattctttcacgaataatatcaacacatacgaaggcggcacgcacgaggccggatttaaaaccggtctgacccgtgtcataaacgactatgcaagaagaaaagggattttcaaagaaaatgatccgaatttaagcggggatgatgtgagagaagggctgactgccattatttcaattaagcaccctgatccgcaattcgaagggcagacgaaaacgaagctcggcaactccgaagcgagaacgatcactgatacgctgttttcttctgcgctggaaacattccttcttgaaaatccggactcagcccgcaaaatcgttgaaaaaggtttaatggccgcaagagcgcggatggcagcgaaaaaagcacgggaattgacccggcgcaaaagtgcgcttgagatttccaatctgccgggcaaactggcggactgttcttctaaagatccgagcatttccgagctgtatatcgtagagggtgactctgcgggcggatcagcgaaacagggacgggaccgtcatttccaagctattctgccgctgcgcggtaagattctgaacgttgagaaagccagacttgataagatcctctcaaacaatgaggtcagatcaatgatcacggctctcggaacaggaatcggagaagattttaatcttgaaaaagcgcgttatcataaagtggtcatcatgacggatgccgatgttgacggcgcccacatcagaacgcttttattaacgttcttctacagatacatgcgggaaatcatcgaaaacggctatgtctacattgcccagccgccgctttataaagtgcagcagggaaaacgggtggaatacgcttataacgataagcagcttgatgagctgttaaaagagcttccgcaatcacctaagcccggcctccagcgttataaaggtcttggagaaatgaacgcgactcagctttgggaaacgacaatggaccctgcgaccagaacgcttctgcaagtcaatcttgaagatgcaatggacgctgacgagacttttgaaatgctgatgggtgacaaagtagaaccgcggagaaacttcatagaagcaaacgccagatacgtgaaaaatcttgatatttaaccaagaaagccttattttcgttaagaaataaggcttttttctcaaagcggcttctaaagcccctgaaaacccgcaaaacccgcaaaacccgtatattctactaaattaatgtgtataaacacaagtttattgatataatggagaatagtgaaatcgtattgaagatcataatggacaatctactcccacattatttcatgtgatacttcagggaggtttttttaatgagtgaacaaaacacaccacaagtacgtgaagtcaatatcagtcaggaaatgcggacatccttcctggactatgcaatgagcgttatcgtatcccgggcgcttccggatgtgcgtgacggtctgaagccggttcacagacggattttgtacgcgatgaatgatttaggcatgaccagtgacaaaccatataaaaaatctgcccgtatcgtcggtgaagttatcggtaagtaccacccgcacggtgactcagcggtttacgaatcaatggtcagaatggcgcaggattttaactaccgctacatgcttgttgacggacacggcaacttcggttcggttgacggcgactcagcggccgcgatgcgttacacagaagcgagaatgtcaaaaatcgcaatggaaatcctccgggacattacgaaagatacgattgattatcaagataactatgacggcgcagaaagagaacctgtcgtcatgccttcgagatttccgaatctgctcgtcaacggagctgccggtatcgcggtcggaatggcgacaaatattcctccgcatcagcttggggaagtcattgaaggcgtgcttgccgtaagtgagaatcctgagattacaaaccaggagctgatggaatacatcccgggcccggattttccgactgcaggtcagattttaggccggagcggcatccgcaaggcatatgaatccggacggggatccattacgatccgggctaaggctgaaatcgaagagacatcatcgggaaaagaaagaattattgtcacggaacttccttatcaggtgaacaaagcgagattaattgaaaaaatcgcagatcttgtccgagacaaaaaaatcgaaggaattacggatctgcgtgacgaatccgaccgtaacggaatgagaatcgtcattgagatccgccgtgacgccaatgctcacgtcattttgaataacctgtacaaacaaacggccctgcagacgtctttcggaatcaacctgctggcgctcgttgacggacagccgaaggtactaagcctgaaacaatgtctggagcattatcttgatcaccaaaaggttgtgatccggcgcagaacggcttacgaactccgcaaagcggaagcgagagctcacattctggaaggtttaagaattgctctcgatcatttagatgccgttatttctcttatccgcaattcccagacggctgaaattgcgagaacaggtttgatcgaacaattctcactgactgaaaaacaagcgcaagccattctggatatgcgccttcagcgattaaccggtctggagcgcgaaaagattgaagaggaatatcaatcacttgttgcgcttatcgccgagctgaaagatattttagccaatgaagcaagagttcttgagatcattcgtgaagagctcaatgaaatcaaagagcgtttcaatgatgagagacgcactgaaatcgtgacgtccggtcttgaaacaattgaagatgaagatcttatcgagagagaaaatatcgtcatcacactgacccataacggctatgttaaacgtctcccggcgtccacataccgcagccaaaaacggggcggaaaaggcgtacagggaatgggaacgaatgaagatgactttgtggaacacttaatttccacatcaacgcacgatacgatcctgttcttctctaataaagggaaggtataccgttctaaaggatatgaaatccctgaatacggccgtacggcaaaaggcattccgattattaaccttctggaggttgaaaaaggcgaatggattaatgccattattccggtcagcacgtttgatgaggagcaatacctcttctttacgaccaaacaaggggtgtcgaaacgtacggcactgtcccagtttgcgaatatacggaataacgggctgatcgccctaggtctccgggaagacgatgaactgatggccgtccgcctgactgacggcaagaaacaaatcatcatcggaacgaagaacggtttgctgatccgtttccctgaagcagatgtaagacaaatgggacgcacagctgcgggtgttaaaggcatcacgctgacagacgatgatgtcgtggtaggcatggagattcttgaagaagactcccatgtcctcatagtgacagaaaacggctacggcaaacgcacaccggcttcagaatacagagttcaaagccggggcggaaaaggccttaaaacatgtaaaatcactgacagcaacggtccgttagtaaccgtgaaagcaacaaaaggcgaagaggacttaatgattattacggcaagcggcgtgttaatcagaatggatattaatgatatttccactacgggacgcgtaacacaaggcgtccgtctgatccgcatgtctgatcaagagcatgtagccactgtggcgcttgtggaaaagaatgaagaagagccggaagaaacggaagaagtataaacgaaaaagcgcagctgcaacaggctgcgcttttactatataaagaagtgaaaaaaagctttgacacatagcgatgatactgatataattctttttgttgtctttttaatagaaaggcaagcctagtgaaaatattttttaaaaaagtattgacctagcaaactgaaaatgttatgattaagaggtcgcttcgagagaagcaacaaagttctttgaaaactaaacaagacaaaacgtacctgttaattcaaagttttaaataaatcgcacagcgatgtgcgtagtcagtcaaactactttatcggagagtttgatcctggctcaggacgaacgctggcggcgtgcctaatacatgcaagtcgagcggacagatgggagcttgctccctgatgttagcggcggacgggtgagtaacacgtgggtaacctgcctgtaagactgggataactccgggaaaccggggctaataccggatggttgtctgaaccgcatggttcagacataaaaggtggcttcggctaccacttacagatggacccgcggcgcattagctagttggtgaggtaacggctcaccaaggcgacgatgcgtagccgacctgagagggtgatcggccacactgggactgagacacggcccagactcctacgggaggcagcagtagggaatcttccgcaatggacgaaagtctgacggagcaacgccgcgtgagtgatgaaggttttcggatcgtaaagctctgttgttagggaagaacaagtgccgttcaaatagggcggcaccttgacggtacctaaccagaaagccacggctaactacgtgccagcagccgcggtaatacgtaggtggcaagcgttgtccggaattattgggcgtaaagggctcgcaggcggtttcttaagtctgatgtgaaagcccccggctcaaccggggagggtcattggaaactggggaacttgagtgcagaagaggagagtggaattccacgtgtagcggtgaaatgcgtagagatgtggaggaacaccagtggcgaaggcgactctctggtctgtaactgacgctgaggagcgaaagcgtggggagcgaacaggattagataccctggtagtccacgccgtaaacgatgagtgctaagtgttagggggtttccgccccttagtgctgcagctaacgcattaagcactccgcctggggagtacggtcgcaagactgaaactcaaaggaattgacgggggcccgcacaagcggtggagcatgtggtttaattcgaagcaacgcgaagaaccttaccaggtcttgacatcctctgacaatcctagagataggacgtccccttcgggggcagagtgacaggtggtgcatggttgtcgtcagctcgtgtcgtgagatgttgggttaagtcccgcaacgagcgcaacccttgatcttagttgccagcattcagttgggcactctaaggtgactgccggtgacaaaccggaggaaggtggggatgacgtcaaatcatcatgccccttatgacctgggctacacacgtgctacaatggacagaacaaagggcagcgaaaccgcgaggttaagccaatcccacaaatctgttctcagttcggatcgcagtctgcaactcgactgcgtgaagctggaatcgctagtaatcgcggatcagcatgccgcggtgaatacgttcccgggccttgtacacaccgcccgtcacaccacgagagtttgtaacacccgaagtcggtgaggtaacctttatggagccagccgccgaaggtgggacagatgattggggtgaagtcgtaacaaggtagccgtatcggaaggtgcggctggatcacctcctttctaaggattttaacggaatataagaccttgggtcttataaacagaacgttccctgtcttgtttagttttgaaggaactttgattctttcatatggtagatgggcctgtagctcagctggttagagcgcacgcctgataagcgtgaggtcggtggttcgagtccactcaggcccaccatctttacccaataaggggccttagctcagctgggagagcgcctgctttgcacgcaggaggtcagcggttcgatcccgctaggctccaccaacgtgttctttgaaaactagataacagaagtaattcacattcaattagtaatgcaagatatcacgtagtgattctttttaacggttaagttagaaagggcgcacggtggatgccttggcactaggagccgatgaaggacgggacgaacaccgatatgcttcggggagctgtaagcaagctttgatccggagatttccgaatggggaaacccaccactcgtaatggagtggtatccatatctgaatacataggatatgagaaggcagacccggggaactgaaacatctaagtacccggaggaagagaaagcaaatgcgattccctgagtagcggcgagcgaaacgggaccagcccaaaccaagaggcttgcctcttggggttgtaggacactctgtacggagttacaaaggaacgaggtagatgaagaggtctggaaaggcccgccataggaggtaacagccctgtagtcaaaacttcgttctctcctgagtggatcctgagtacggcggaacacgtgaaattccgtcggaatccgggaggaccatctcccaaggctaaatactccctagtgaccgatagtgaaccagtaccgtgagggaaaggtgaaaagcaccccggaaggggagtgaaagagatcctgaaaccgtgtgcctacaagtagtcagagcccgttaacgggtgatggcgtgccttttgtagaatgaaccggcgagttacgatcccgtgcaaggttaagcagaagatgcggagccgcagcgaaagcgagtctgaatagggcgaattgagtacgtggtcgtagacccgaaaccaggtgatctacccatgtccagggtgaagttcaggtaacactgaatggaggcccgaacccacgcacgttgaaaagtgcggggatgaggtgtgggtaggggtgaaatgccaatcgaacctggagatagctggttctctccgaaatagctttagggctagcctcaaggtaagagtctcggaggtagagcactgattggactaggggcccctaccgggttaccgaattcagtcaaactccgaatgccgatgacttatccttgggagtcagactgcgagtgataagatccgtagtcgaaagggaaacagcccagaccgccagctaaggtcccaaagtatacgttaagtggaaaaggatgtggagttgcttagacaaccaggatgttggcttagaagcagccaccatttaaagagtgcgtaatagctcactggtcgagtgactctgcgccgaaaatgtaccggggctaaacgtatcaccgaagctgcggactgttcttcgaacagtggtaggagagcgttctaagggctgtgaagcaagaccggaaggacttgtggagcgcttagaagtgagaatgccggtatgagtagcgaaagaggggtgagaatcccctccaccgaatgcctaaggtttcctgaggaaggctcgtccgctcagggttagtcgggacctaagccgaggccgaaaggcgtaggcgatggataacaggttgatattcctgtaccacctcctcaccatttgagcaatggggggacgcaggaggatagggtaagcgcggtattggatatccgcgtccaagcagttaggctgggaaataggcaaatccgtttcccgtgaaggctgagctgtgatggcgagcgaattatagtagcgaagttcctgattccacactgccaagaaaagcctctagcgaggtgagaggtgcccgtaccgcaaaccgacacaggtaggcgaggagagaatcctaaggtgatcgagagaactctcgttaaggaactcggcaaaatgaccccgtaacttcgggagaaggggtgctctgttagggtgcaagcccgagagagccgcagtgaataggcccaggcgactgtttagcaaaaacacaggtctctgcgaagccgtaaggcgaagtataggggctgacgcctgcccggtgctggaaggttaagaggagcgcttagcgtaagcgaaggtgcgaattgaagccccagtaaacggcggccgtaactataacggtcctaaggtagcgaaattccttgtcgggtaagttccgacccgcacgaaaggcgcaacgatctgggcactgtctcaacgagagactcggtgaaattatagtacctgtgaagatgcaggttacccgcgacaggacggaaagaccccgtggagctttactgcagcctgatattgaatgttggtacagcttgtacaggataggtaggagccttggaaaccggagcgccagcttcggtggaggcatcggtgggatactaccctggctgtattgaccttctaacccgccgcccttatcgggcggggagacagtgtcaggtgggcagtttgactggggcggtcgcctcctaaaaggtaacggaggcgcccaaaggttccctcagaatggttggaaatcattcgcagagtgtaaaggcacaagggagcttgactgcgagacctacaagtcgagcagggacgaaagtcgggcttagtgatccggtggttccgcatggaagggccatcgctcaacggataaaagctaccccggggataacaggcttatctcccccaagagtccacatcgacggggaggtttggcacctcgatgtcggctcatcgcatcctggggctgtagtcggtcccaagggttgggctgttcgcccattaaagcggtacgcgagctgggttcagaacgtcgtgagacagttcggtccctatccgtcgcgggcgcaggaaatttgagaggagctgtccttagtacgagaggaccgggatggacgcaccgctggtgtaccagttgttctgccaagggcatcgctgggtagctatgtgcggacgggataagtgctgaaagcatctaagcatgaagcccccctcaagatgagatttcccattccgcaaggaagtaagatccctgaaagatgatcaggttgataggtctgaggtggaagtgtggcgacacatggagctgacagatactaatcgatcgaggacttaaccaatttgaatgtatgcttactgttatctagttttgagagaacactctcaatggtttggtggcgatagcgaagaggtcacacccgttcccatgccgaacacggaagttaagctcttcagcgccgatggtagtcgggggtttccccctgtgagagtaggacgccgccaagctataatatggtaaaggcagctcatcatgagctgccttttttgtttataagtattgcttcaggaaattagaaacgtaatacggaaatttgcgttccgtgacatctaagaaccggcggatcatcacataatcatcactgacatgctgtgtcagcagttcataccaccactccgtttcatatctcgcaatcatcccgatattgtagaggaccaaataatgaataatcatttccggaagatgcaggaagtgatcacgctgagagggaatgtaatattgatttttctccaagtgaaacaataaatttggcgaagaccaagattctctgtctatcgggtcagcctcaaaaaccaagtggttatggtctttcctcagaaaagaccactttaaatgatggctgatatattcagcaaatcgggaatcagacatattgtaatgaatcaccgcatgctcaggcactgaaataaggtcatctttgagctctactcgggtcagccaattctttttctcttggaagtaaaagacagtatgcaattcaggtatggctgtcagcaatttcttcattgtgtaccgttcttcctcaagaccagctatcccgaataagtgcttcattacatgaatacataagccattgcgctgcaccttcacttcatcatccctaaaggagtaattttgctttttgcgtttccgggcagtcacgccatgcgcgagtactgaggcgtggcttggatagcttggatctgtggtcagaaggcaggctttcagcaattgtgacatcccgtaaaacaacagaataggcttaatttctaaaggggaaaaagatgcctgcttgtagaaggactcggcgtgtttgataaagaatatgaagcgctcactgttcttaaacgcatatcgttttggttcttccatgccgctttctgtatagactttgtttagaaatttctgggaagattctacggaataaaataatgataactctttccactcatgatctctcatatgtatttttaaaccctttcctttatctaaatatttcaactctttttcgcttccttgacatgctgttttctagttgataatctacatataatattttgccgaaaagagggggatttactaatgtgggaaagtaaattttcaaaagaaggcttaacgttcgatgatgtactgctcgtaccggctcaatcagacgtacttccgcgtgatgtggatttatctgttgaactgacaaagacgttaaagcttaacattcctgtcatcagtgcgggaatggatacagtaacagaatcagctatggcgattgcgatggccagacagggcggcttgggtattattcataaaaacatgtccatcgagcagcaggctgaacatgttgacaaagtcaaacgttctgaacggggcgttattacaaatcccttctttttaacacctgatcatcaagtattcgatgcggagcatttgatggggaaatacagaatttccggtgttccgatcgtagataataaagacgatcaaaagcttgtcggtatcattacaaaccgtgaccttcgctttatctctgattattcaatgaaaatcagtgatgtcatgacaaaagaagagctggttacggctcctgtgggaaccacattagacgaagcagaaaaaatcttacagaaacataaaattgaaaaacttccgttagtggatgaccaaaacaaattaaaaggtcttatcacgatcaaagatattgaaaaggttatcgaattcccgaattcatctaaagatgaacacggacgccttattgtcggcgctgcggtaggcgtgacaggcgatacaatgacacgcgtcagcaagcttgttgaagcgaatgtcgacgttatcgtggttgatacggctcacggacattccagaggcgtactgaacacagtcgcgaaaatccgtgaaacatatcctgaactgaacattatcgcaggaaatgttgcaacggctgaagcgacaaaagccctgattgaagccggagcaaatattgtcaaagtgggaatcggacctggttctatctgtacgacacgcgtcgttgcaggtgtaggcgtaccgcagatcactgccatttatgattgtgccactgaagcgagaaaacacggcgcgacaattatcgcagacggcggtattaaattctccggagatattacgaaagcgttggcttcaggcggacatgccgtaatgctcggaagcctgcttgccggtacttcagaaagcccgggagagactgaaatctatcaaggcagaagatttaaagtgtatcgcggtatgggttctgtcgctgccatggaaaaaggcagtaaagaccgatatttccaagaagaaaataagaaattcgtccctgaaggtatcgaaggacggactccgtacaaaggtcctgtagaagaaacagtgtatcagcttgtcggcggtcttcgttcagggatgggatattgcggttcaaaagacttgcgcgctttaagagaagaggctcaattcatccgtatgacaggtgccggacttcgcgaaagtcatccgcatgatgtccaaattacgaaagaatcaccaaactatacaatctcataattgttacaaataaaaaacatttgacagggtcgctgactctgtctattttttttatatcgagtgtgataaaatttatactgttgtgttttgaatttgaatatgtccttaacggcttaattatagatttaaaatgaatgacggaggtcgtaagattgaacatcacgaaatggaaacagctgttggtgtcattagtggtactggcactggccgcaacttgctttgttccaatgtctaaagcggaggcagccggcaatgacccgattgatgtcaacgcatcagctgcgataatgattgaggcttcatcgggaaaaattttatacagtaaaaatgcagacaaaagactgccgattgccagcatgacaaaaatgatgactgaatatctgcttctggaagccattaaagaaggaaaagtgaaatgggatcaaacgtatactcctgatgattatgtctatgaaatttctcaagacaacagtttatcaaacgtcccccttcgaaaagacggcaaatacacggttaaagaactgtatcaggctatggcgatttactctgccaacggagccgcgattgcagttgccgaaattcttgccggaactgaaacgaaatttgtcgctgaaatgaatgcgaaagccaaagaattaggcatgacaaactatgattttaaaaatgccacaggtcttgtgaatgaagaccttcacggcaagcagccgcaaggagaaggcgttaaagaagagagtgaagtttctgctaaagacatggcgcttcttgcagaccgcctgatcactgattatccggaagttctcaaaacaacaagcatcgctaaaacgaaattcagagccggcactgatgatgaaatggacatgccgaactggaacttcatgttaaaaggtcttgtttctgaataccctggcgttgacggcttaaaaacgggttctactgattctgcgggatcttgttttacaagcacagcacagcggaacggaatgcgggtcatcaccgttgtattagacgcaaaaggcaacctgcataccggacgttttgatgaaacgaaaaaaatgctcgattacgcatttaacggcaatttctcaatgaaagatctttaccctgaaggctctcaagtaaaagggcacaaaacgattgacgttgaaaaagggaaagacaagcaagtcgatattgttactgacaaggcgctttctattcctgtgaaaagcggggatgaaaagaactataaagccgaagtgactttagataaaaaagaaatcacggctcctgtgaaaaagggaacgaaagtcggaacgctgacagttacatacaaaggcagtgacaaagactatggcttcctcaaatccaaagagttcagcgtgaatcttgtaacgaaaaatgatgtagataaagcaaactggtttgttcagatgatgcgcggcatcggcggattcttctccggtatctggaacagcgccgttgacacggtaacaggctggttttaagaaataagaaagagctctgatgaaagttagggctcttttgcttaatatactgaaaaaaccaaattattagtaaaaaaatgatatctatcttattcatctcgctgtaaaataagaatacccatatgaaatattgtatttctgggatacaataagagatagaaattatctaactatacattgactagggggaccaaataatggctcaaacaggtactgatcgtgtaaaacgcggcatggcggaaatgcaaaaaggcggcgtcatcatggacgttgtaaatgctgaacaagcgaagattgcggaagaggcgggagctgttgccgtaatggcgttagaacgcgttccggctgatattcgcgctgccggcggtgttgcccgcatggctgatccgacaatcgttgaagaagtaatgaatgctgtatccattcccgtaatggcaaaagcgcgtatcggacatatcgttgaagcgcgtgtccttgaagcaatgggagtagattacatcgatgaaagtgaagttctgactccggctgacgaagaatttcatttaaataaaaacgaatatacagtcccgttcgtatgcggctgccgtgatctcggcgaagcaacgcgccgtatcgccgaaggagcttccatgcttcgtacaaaaggcgaaccgggaacaggaaacattgtggaagctgtccgccatatgagaaaagtaaacgcgcaagtgcgcaaagttgttgcgatgagcgatgatgagctgatgactgaagctaaaaacctcggcgctccttatgaactgcttcttcaaatcaagcgtgacggcaaactgcctgtagtgaactttgctgccggcggagtagcgacgcctgctgacgcggcattgatgatgcagcttggcgctgacggcgtatttgtcggttcaggtattttcaaatcagacaaccctgctaaattcgccaaagcaattgttgaagcaacgactcattacacagactacaaactgatcgctgagctttctaaagaattaggcacagcgatgaaaggaatcgaaatctcaaatctattgccggaacagcgtatgcaagaacgcggctggtaaaaccataggagagctggaagcatgttaacaattggtgtacttggacttcaaggagcagtaagagaacatattcgttcaattgaagcatgtggttcaaaaggtgtcgtcattaagcgtcctgaacagctgaatgacatcgacggcttaatcctgccgggcggggaaagcacgacgatgcggcgtttaatggatacgtatcattttatggagccgcttcgcgagtttgccgcccaaggcaagccgatgttcggcacatgcgccggtctgatcattttagccaaagagatagcgggaacggataacgctcatttagggctgttgaacgttgtcgtcgagcgtaattcctttggccgtcaggttgacagctttgaagctgatctgacgattaaaggccttgatgagccgtttacgggtgtatttattcgcgcgccgcatattttagaagccggagaagatgttgaagtgctttgtgagcataacggacgcatcgtggctgcaaagcaggggaatttcctcggctgctcgttccatcctgaactgacggatgatcaccgggtgacagagctgtttgtgaagatggcggaaaagcataagcaggaaacagctgtataaaacagttgaaaaccgctgatacttatagtacattataaacacaaataaagatcgaaaagcgttgacaggaagcagtaggaagcctctctttcaaagagagccgatgggtggtgcgaatcggtgaaagatgctgtccgaatccgtccttgagcgaaatgctgaaaacaagtaggcatttacgggaaaaccgttatgtgttaaagcgggaagcaagtgtgagcttgttttcaatcagggtggcaacgcgagagctctcgtcccttttaggggatgagggctcttttttattttcgataaaaacagataggagttgttaggcatgattgatacgaaggtgctgagagccaattttcaagaggtaaaagcgaagctcattccaaaaggcgaagacttatctgactttgacaagtttgaagagctggacgaaaagagaagagagcttatcggtaaagtagaagaactgaagggaaaacgcaatgaagtatctcagcaggtcgccgttttgaaacgggagaaaaaagacgctgatcatattattaaagagatgcgcgaagtgggcgaagaaattaagaagcttgatgaagagcttcgtacggtcgaaacgacgctcgaaaccatccttctgtctattccgaacatcccgcacgattcagtgcccgtcggggaaacggaagatgataacattgaaatccgcaagtggggagaggcgccggcgttttcatatgagccgaaaccgcattgggatatcgcagaccatttaaacattcttgatttcgaacgcgcttcaaaagtaacaggcagccggtttgtgttttataaaggattaggcgcccgcctcgaacgcgcgctctacaactttatgctggatcttcacgttgatgaatatgattacacggaagtcattcctccttatatggtaaaccgtacgagcatgacaggcacgggacagcttcctaaatttgaagaggatgcttttaaaatcagagaagaggattatttcttaattccgacggcggaagtgccgattacaaatatgcaccgcgatgaaatcttatccggtgagaacctgccgatcaattatgccgcattcagcgcttgcttccgttcagaagcgggatctgccggccgtgatacacgcggtttgatccgccagcatcagttcaacaaggttgagcttgtgaaattcgtgaagccggaagattcttatgaggagcttgaaaaactgacgaatcaagctgagcgggtgcttcagctgctcgaactgccgtatcgtgtcatgagcatgtgtaccggtgatctcggctttacagccgcgaaaaagtacgatattgaggtatggattccaagccaagacacataccgtgaaatttcttcttgcagtaactttgaggccttccaggcgagacgcgcaaacattcgattcagacgcgaagcgaaaggcaagccggagcatgtgcatacattaaacggttcaggtcttgcagtcggcagaacagtagctgccatcttagaaaactatcagcaggaagacggaagtgtcatcattccgaaagtgcttcgtccttatatgggaaataaagaagtcatcaaaccgtaaaaggtgcgccctagaggcgcgccttttttgctgcccggtatagagcggcggcattccgggcagtgctttcaaggttaaaacggccggatgctaaggcgtcttcaagacttacagcgccgggcacgatagaaaaaacagccgttattcctgcgctgtaaacatgctcgaaatttttgcctaaggagcccgccaatgcgataacgggaatttcttgagcagatgcgcgtgcggcgatcccggcgggggttttgccgaatagcgtttgtccgtctatctgcccctctccggtaatgacaaggtcagcgccccttatctgatctgagaaggacagtgtatctaatacaacgtcaatcccgctttgaagttctgcctgtaagaaagcgatcagtccggcgccgagtccccctgcggcgcccgcgccttttacggtatccgcttcgatattgtgctgacgtctcaatacgtcagcgaaatggcgtaagttgcgatccaatacaactttagtcttctcggatgcccctttttgcgggccgaagacatatgaagcgccgtttttaccggtcagaggattttcgacatcacatgcggcacggatacggatatgtttcagatcaggagagagaccgcttatatcaatagaagctagggtgtgcagagcgcctccgccgtcaggtatctcctgaccttcctcatttaagaaacgcacaccgagcgcgctcgccattcctgttccgccgtcattggttgcgctcccgccaagcccgatgatgatctcacccgccccgcgggaagctgcatctgctatcagttcacccgttcctcttgtcgttgtgttcaacggatctctgagatggcggggaacgagatgaagtcccgatgcttccgccatttcaatgactgccgtgcgtccgtctcccagaagtccatatgcggcgtttaccggcgttcccagcggaccggtcacagtttttttgatgatacttccgccagtggcatccgtcaaagcctgaacggttccttctccgccgtcggccgcaggtatcttgaaatattccgcgtcagggaagaccgctttgaatcctttttctatgctgtcagcggcttcttttgatgtcatgctttctttgaaagaatccggtgcaatgatgattttcattatgttctccacctttatgagcaggtatctgtttgaatctattcttgatttttactgtgttttcctgcccgtatggcatactgaggttgaattggacgcaagacttttgtatgatagtaaagctgacggacaagctgtttaagaaatgaaataaaaaatatgaaaaagcgcttgactgaaatttaggtcatgtggtatattattaaatgtcgatacggaggaatacccaagtctggctgaagggatcggtcttgaaaaccgacaggggtgtcaaagcccgcgggggttcgaatccctcttcctccgccatattgattttaaacctaatgaaactcgagcatatattggagattgttttgtccgctgcatgtgatgcagcggattttttatatgcaaaaaaagcgattttctctgttcggggaaaatcgctttgctatttttatttatttctgttttcgttgatcacgcggctgattttttcgatcaaaggttccagtgactgttcatcagcttcaaggtcataatcttcaatgcgcacttttagcacagggcaggcgttaaaaccgctgatccagtcttcgtaccgtgtatacatctcttcccaataggagcggtttgtctgcagctccatctcgcggccccgcttctcaatccggtttataatgttttcaaggtcgccttctaaatagatcaaaacatcaggatgcgggaagtacggcgtcatgaccatcgcctcaaatagacttgtgtatgttgtgtaatctgtcagcgacatggttcctttatcggcatgcatttttgcgaatatgcctgtatcctcataaatcgaacggtcctgcacgaatccgccgcctgattcaaacatgtttttctgctctttgaaccgctcagccagaaaataaatttgcaaatggaagctccagcgttcaaaatcgtgataaaacttctctaaataagggttttcatccacttcctcaagtgaggtgtgaaacccgagccgttttgctaaagctttggtcaaagtcgattttccgactcctaccgttcccgctactgtgataatggcgttgtttggaatatgaatgtctttcatttaataagctcctttacctgacgggcaattctttcatagtctgtcttattcaaaacaaagtcttcagtatcaccgtcaatggtcagtacagatatatccggatcttcttcctgaagctgtctgatggctgtgtcgtaatctgcaatgagacgttccagatattgatgctcgatatttttctcaaacgggcgcccgcgtttttcaatgcgttgaagcaatgtcggcaggcttgcctttatgtatacaatgatattcggtttcggcaggtcgtgagtgagcagatgataaatctgcttatatttctcaagcttttggccgtgcaatgtacgctctgcgaaaataacatttttataaatatgataatcggacaaaacgggctgtccttgttttaaataatctcgatcggtgtcctcaagctgtttatacctgtgacatagaaaaaacatttcaagctggaaactccactcctcgatattgtcataaaacttatcgagataagggttgtcttccacaatctcattaatcataggaaaaccgagctcttcagaaagcatcgtagcgagtgtcgtttttcctgccccgataggaccttctaccgcgataaaaggggctctgttcattgaaaatcctccttaattctgcaaacatccgtcagctgccggcctttatattgtatcacactctccgaaaagcccatgaaaaaagacgcttccaattaacgaaacgtctcttttacaatatgaaattgatcgttgagcaaaagccagttttgcgggaaagaaaggccgagtttccaatagctgattcctcttaaatgaagttctttaattaaattgaatttcgcttgaatggatcgtgcgtcttcaaaccatacttcatgccgtctctgattttcatccgtgtatcgaaagaatggagcctgggcggtttcgtcatattgaatgtcgactttatggcgtgctgccagagcgattgcctgctgaggactgacggctttggctgtcgttccctgtttaaaaggcagtgtccaatcgtagccgtacatgttctggcccatgacgatttttgaagaaggcatttccgtcagcgcgtactcaatgacatttcttacagggccgataggtgatacggcctgagccgggcctccgctgtacccccactcatatgtcatgattacgacaaaatcgacgatttctccatgtgccctatagtcatgtgcttcgtaccatttgccggcctgagtcgcgctcgttttcggagcaagcgccgttgaaatcttccagccttcccgatgaaaaatcgtcctcgcttcacgtaaaaaacgattgtaggcttctctgtcctgtggacgtaaatattcgaaatcaaagtgaatatcgcgaaagccgtactttttagccgtggagacgatttcctgaaagagttttgttttcactgtattgtcattcaagatgagccgcccgagttcatcgctgaatgcgtcattttcaaggttggtgatgatcatcatcagtgtggtgttgtgcctgtcactgatactttttaaattggtcagaggcggttcctttaaagtcccgttccgctgcacttgaaaactgaatgcgccaaggtatgttaaataaggagaggcctcccttgccgcctgctgcagattagcgcttacgctcgttccccgcggttctatatatgcgtttgattcgatatcgggcttattcgcctgctgcggaatgtaaaggctggttccgactctcaatgtggtgccgggctgaattccgttaaccctcgcaagctccgcggccgatatatgaaaacggccggcgattgccgcgagagtatcaccttgtttcacttcgtaatattgaccctcaatcgggatgacaagggtttgtccgacaaccaatgtatttggattaggcagtttatttgcttccgcaatgacatttgcggcagtccggtagcgcgccgcaatagcggaaagcgtgtcgccccgtttcactatatagatctgaatgaaaaacgcctcctttcatatccgctatcaaatatatgaaaaaaggaggctgatcatgtttatttttcggcggtaatttgtttttccgtggttatttctgcgaagagaacattctccatcatggtcaaagcgaaatcattgtcttcgtcgttattggaagcggtgcagtctttcggaatggcaatgctgtattctctcatataggcgtcgttggccgtgaacagcacacaaatgttcccggcaatccccgtgatgactaatcggttcacttgtaattcggtcagaagggtgtgaagcgctgtttcgtaaaaagcggaatgcttcggtttaatgagaaaataatcatccggctgaggcgaaatttcttttataatgggggcgcttctgtcgttgctgcattcctccctgatggcatcaatatcagccttccagagcccgtaatgatcattaatataaataatcggccagttgctttgttttgcatgcttctttaatgataaaatacgggggacaatttgtttggttttttcagcaagacgttcgcccatatcaaattgaaaattgttgatcatatcgacaatcagaagggctgtgttgttaggttcagacaataccggcaactcctttctgctggggtattcctattttaacctttatgagacatgaaaaaacttaagaagagagctcgaacctatgaatgatgaatattatatgagagaagccataaaagaagcgaagaaagccgaagcgaaaggtgaagtgccgatcggagcagttcttgttctgcacgatgagatcgtggcgcgggcgcataatctgcgggagactgaacagaggtcgcttgcccacgccgaaatgctggcgatagacgaagcgtgccgtaagctggggacatggagacttgaggatgccgttctttatgtcactttggagccgtgtccgatgtgcgcgggggctgttgtgctttcgagagtcgataaggtcgtattcggcgcatttgatcccaaggggggctgtacaggaacgctgatgaacctcttgcaggaagagcggttcaaccaccaagcggaagtggtgagcggcgtgctcggagaagagtgcggagaaatgctcagcgcttttttcagaaagctgcgccggaaaaagaaagacatgaggaaaaagttgtctgagtagtacggttgcattttctgcctgaagcagatatacttatgtgtgcatcatgaatggtgcgcatataaaaatttgatatttattttgccgtgctaagcggggaggtagcggtgccctgtacccgcaatccgctctagcggggccgaatcccttctcgaggttcgtttactgtaaggtctgccttaagtaagtggcgttgacgtctgggtcctgcgcaatgggaattcatgaaccatgtcaggtccggaaggaagcagcattaagtgaaacctctcatgtgccgcagggttgcctgggctgagctaactgcttaagtaacgcttagggtagcgaatcgacagaaggtgcacggtaaatcaatcatcaaatttcagactcacctgtttatggcaggtgagttttttcgtatatgaaaaacgggttttggcgttaaaagcacgttcatgtataataaacatgatgaataacagaggagggcgcatcctgtgggttaccaagctttatatcgagtatttaggcctcagcagtttgaagatgtggtcggacaggaacacattacgaaaacgctgcaaaatgcccttttgcaaaagaaattttctcatgcatatctgttttctggaccgcggggaacgggaaaaaccagtgcagctaaaatatttgcgaaagcagtcaactgtgagcacgcccccgtagaagaaccgtgcaatgaatgtgcggcgtgcaaggggatcacaaacggctctatatcagatgtgattgaaatagatgcggcgtcgaataacggcgtagacgaaatccgcgacatccgtgacaaagtaaaattcgccccgtcggccgtcacctacaaagtatatattatagatgaggtgcatatgctctctatcggcgcattcaatgcgcttctgaaaacgctggaagaaccgccggcacattgcattttcatattagctacgactgagcctcataagattcctttaaccattatctccagatgtcagcgttttgacttcaaacggattacatccaaagcaattgtcggacgaatgaagacaatcgtcgatgcagagcagctgaaggtggaagaaggagcccttgatatcatagcgagtgctgcggacggaggaatgagggacgcgctgagcctgctcgatcaagccgtatcattcagcggcgaggagctgtcggtggatgacgcattgctcattaccggagccgtttctcagcactatattggaaaactggcatctgctcttcaccgcaaacaggtttccgaggcattggaaacactgaatgaattgctccagcaggggaaagatgcggccaaactgattgaagatatgattttctatttcagggatatgctcttgtaccaggccgctcccggtttagaaggagtcctggaaaaggtgaaggtcgatgaaacgtttcggaatctgagcggtgaaataccggcccccgctttatatgagatgattgatatcctgaataaaagccatcaggaaatgaagtggacgaaccacccaagaatcttttttgaagtggctgtcgtgaaaatatgccagacggcacagcaatccgccggagacatccctgaggtcggcatgctgatgaataagatccagcagcttgagcaggaagtagaaaggctgaaaacctccggtgtgaaggttcagatggaaagcgctccgaaagaagctccgcgtcctcaaaaaggcggaaaaagccattacaaagctccggtcggaagaattcatgagatattgaaggaagccacaagacctgaacttgaacagcttaaaagcagctggggcaagctgctggcacacctgaaacagcagaataaggtgtctcatgcggctctgttgaatgacagtgaaccggtggctgctgctcaaaaggcatttgtacttaaatttaaatacgaaatccattgtaaaatggttgcagaagacaataacggagtccgtacgaatcttgaacagattctcgaatcaatgctcgggaaaagaatggatttgattggcgttccggaagcacaatggggtaaaataagagaagaatttttaaatgatcaccagcaggaaagtgaaggatcaaacgaaccggctgaagaagatccgctgattgcagaggcgaaaaaacttgtcggagcggatttaatcgaaataaaagactaataagatgaaagagagtgattgaatatgcgtggcggaatgggaaacatgcaaaaaatgatgaaacaaatgcaaaaaatgcaaaaggatatggcgaaggctcaggaggagcttgctgaaaaagtgcttgaaggcacagcaggcggcggtatggtgactgtaaaagtcaacggccaaaaagaagttgtagacattgccattaaagaagaagtcgttgatccggaagatatcgaaatgcttcaggacctggttcttgctgcgacaaacgacgccctcaaaaaagtggatgacatgacgaatgaaacaatgggacaatttacaaaaggaatgaacataccgggtttgttctagggggataaataaacatgcagtatcctgaaccaatatcaaagctgattgacagctttatgaaattgccagggatcggaccgaaaacagcggttcgtctggctttttttgttctaggtatgaaagaagacacagtattggattttgctaaggcgcttgtcaatgcgaagcggaatctgacatattgctcgatttgcggacatataacagatcaggacccttgttatatatgtgaggacacaagaagggataagtctgttatttgtgtcgtgcaggaccctaaggatgtgatcgcaatggagaaaatgaaggaatataacggccagtatcatgttcttcacggcgcgatttcaccaatggacggcatcggcccggaggatattaagattccggagctgctgaaacgtcttcaggatgatcaagtgacagaagttattctcgcaaccaaccctaatattgaaggggaagcaacagcgatgtatatatcaaggctgttaaagccctcaggcatcaagctctcccgtattgcccacggtctgcccgtcggcggtgatttggaatatgctgatgaggtcactctttcaaaagctcttgaaggaagacgtgaattgtaagggaggaaaaggcaaggcatgggttttcttcgcagaaatacattaagaaaagagtttgatgagaagctgatagaacagctctttaaacaaaaagaagaatggaacagacagaagagtctggtcgagaaaagtctcgagccctccgctgaggtgttgtttgagctgaaagtcgctgaatctaaatactttttctatttgaaagaagcgaagcagcggaatttgaaaatgagcagatggaagtaagaggtctattctccgggatcttctcataagcttgtactaaacaagcgagggggaagattcatggagccttttttcattatcggtttgattgtcggtctggttgctttgctttttttatggggagtatcttcaaaaccgctaagatggattggtgtgaccgccattaaatttattgccggcgcgattctgctggtgggtgtgaacctgttcgggggcagtctcggtattcatatccctgttaacctgattacaacgggcatcagcgggattctggggattcccggcatcgcggctttgatagtcattaaacgcttcatcatttaatttgtcgattattgttgacatgttggatcaacggtggtattctaatatacgtcgctgatgacgaaacgaattcttaaaaaagaaattttaaaaagttattgacgacgtggaagttgatatgttacaataattaagtcgcttcaagagcgatggacaaagttctttgaaaactaaacaagacaaaacgtacctgttaattcaaagttttaaataaatcgcacagttatgtgcgtagtcagtcaaactactttatcggagagtttgatcctggctcaggacgaacgctggcggcgtgcctaatacatgcaagtcgagcggacagatgggagcttgctccctgatgttagcggcggacgggtgagtaacacgtgggtaacctgcctgtaagactgggataactccgggaaaccggggctaataccggatggttgtctgaaccgcatggttcagacataaaaggtggcttcggctaccacttacagatggacccgcggcgcattagctagttggtgaggtaacggctcaccaaggcgacgatgcgtagccgacctgagagggtgatcggccacactgggactgagacacggcccagactcctacgggaggcagcagtagggaatcttccgcaatggacgaaagtctgacggagcaacgccgcgtgagtgatgaaggttttcggatcgtaaagctctgttgttagggaagaacaagtgccgttcaaatagggcggcaccttgacggtacctaaccagaaagccacggctaactacgtgccagcagccgcggtaatacgtaggtggcaagcgttgtccggaattattgggcgtaaagggctcgcaggcggtttcttaagtctgatgtgaaagcccccggctcaaccggggagggtcattggaaactggggaacttgagtgcagaagaggagagtggaattccacgtgtagcggtgaaatgcgtagagatgtggaggaacaccagtggcgaaggcgactctctggtctgtaactgacgctgaggagcgaaagcgtggggagcgaacaggattagataccctggtagtccacgccgtaaacgatgagtgctaagtgttagggggtttccgccccttagtgctgcagctaacgcattaagcactccgcctggggagtacggtcgcaagactgaaactcaaaggaattgacgggggcccgcacaagcggtggagcatgtggtttaattcgaagcaacgcgaagaaccttaccaggtcttgacatcctctgacaatcctagagataggacgtccccttcgggggcagagtgacaggtggtgcatggttgtcgtcagctcgtgtcgtgagatgttgggttaagtcccgcaacgagcgcaacccttgatcttagttgccagcattcagttgggcactctaaggtgactgccggtgacaaaccggaggaaggtggggatgacgtcaaatcatcatgccccttatgacctgggctacacacgtgctacaatggacagaacaaagggcagcgaaaccgcgaggttaagccaatcccacaaatctgttctcagttcggatcgcagtctgcaactcgactgcgtgaagctggaatcgctagtaatcgcggatcagcatgccgcggtgaatacgttcccgggccttgtacacaccgcccgtcacaccacgagagtttgtaacacccgaagtcggtgaggtaacctttatggagccagccgccgaaggtgggacagatgattggggtgaagtcgtaacaaggtagccgtatcggaaggtgcggctggatcacctcctttctaaggattttaacggaatataagaccttgggtcttataaacagaacgttccctgtcttgtttagttttgaaggaactttgattctttcatatggtagatgggcctgtagctcagctggttagagcgcacgcctgataagcgtgaggtcggtggttcgagtccactcaggcccaccatctttacccaataaggggccttagctcagctgggagagcgcctgctttgcacgcaggaggtcagcggttcgatcccgctaggctccaccaacgtgttctttgaaaactagataacagaagtaattcacattcaattagtaatgcaagatatcacgtagtgattctttttaacggttaagttagaaagggcgcacggtggatgccttggcactaggagccgatgaaggacgggacgaacaccgatatgcttcggggagctgtaagcaagctttgatccggagatttccgaatggggaaacccaccactcgtaatggagtggtatccatatctgaatacataggatatgagaaggcagacccggggaactgaaacatctaagtacccggaggaagagaaagcaaatgcgattccctgagtagcggcgagcgaaacgggaccagcccaaaccaagaggcttgcctcttggggttgtaggacactctgtacggagttacaaaggaacgaggtagatgaagaggtctggaaaggcccgccataggaggtaacagccctgtagtcaaaacttcgttctctcctgagtggatcctgagtacggcggaacacgtgaaattccgtcggaatccgggaggaccatctcccaaggctaaatactccctagtgaccgatagtgaaccagtaccgtgagggaaaggtgaaaagcaccccggaaggggagtgaaagagatcctgaaaccgtgtgcctacaagtagtcagagcccgttaacgggtgatggcgtgccttttgtagaatgaaccggcgagttacgatcccgtgcaaggttaagcagaagatgcggagccgcagcgaaagcgagtctgaatagggcgaattgagtacgtggtcgtagacccgaaaccaggtgatctacccatgtccagggtgaagttcaggtaacactgaatggaggcccgaacccacgcacgttgaaaagtgcggggatgaggtgtgggtaggggtgaaatgccaatcgaacctggagatagctggttctctccgaaatagctttagggctagcctcaaggtaagagtctcggaggtagagcactgattggactaggggcccctaccgggttaccgaattcagtcaaactccgaatgccgatgacttatccttgggagtcagactgcgagtgataagatccgtagtcgaaagggaaacagcccagaccgccagctaaggtcccaaagtatacgttaagtggaaaaggatgtggagttgcttagacaaccaggatgttggcttagaagcagccaccatttaaagagtgcgtaatagctcactggtcgagtgactctgcgccgaaaatgtaccggggctaaacgtatcaccgaagctgcggactgttcttcgaacagtggtaggagagcgttctaagggctgtgaagcaagaccggaaggacttgtggagcgcttagaagtgagaatgccggtatgagtagcgaaagaggggtgagaatcccctccaccgaatgcctaaggtttcctgaggaaggctcgtccgctcagggttagtcgggacctaagccgaggccgaaaggcgtaggcgatggataacaggttgatattcctgtaccacctcctcaccatttgagcaatggggggacgcaggaggatagggtaagcgcggtattggatatccgcgtccaagcagttaggctgggaaataggcaaatccgtttcccgtgaaggctgagctgtgatggcgagcgaattatagtagcgaagttcctgattccacactgccaagaaaagcctctagcgaggtgagaggtgcccgtaccgcaaaccgacacaggtaggcgaggagagaatcctaaggtgatcgagagaactctcgttaaggaactcggcaaaatgaccccgtaacttcgggagaaggggtgctctgttagggtgcaagcccgagagagccgcagtgaataggcccaggcgactgtttagcaaaaacacaggtctctgcgaagccgtaaggcgaagtataggggctgacgcctgcccggtgctggaaggttaagaggagcgcttagcgtaagcgaaggtgcgaattgaagccccagtaaacggcggccgtaactataacggtcctaaggtagcgaaattccttgtcgggtaagttccgacccgcacgaaaggcgcaacgatctgggcactgtctcaacgagagactcggtgaaattatagtacctgtgaagatgcaggttacccgcgacaggacggaaagaccccgtggagctttactgcagcctgatattgaatgttggtacagcttgtacaggataggtaggagccttggaaaccggagcgccagcttcggtggaggcatcggtgggatactaccctggctgtattgaccttctaacccgccgcccttatcgggcggggagacagtgtcaggtgggcagtttgactggggcggtcgcctcctaaaaggtaacggaggcgcccaaaggttccctcagaatggttggaaatcattcgcagagtgtaaaggcacaagggagcttgactgcgagacctacaagtcgagcagggacgaaagtcgggcttagtgatccggtggttccgcatggaagggccatcgctcaacggataaaagctaccccggggataacaggcttatctcccccaagagtccacatcgacggggaggtttggcacctcgatgtcggctcatcgcatcctggggctgtagtcggtcccaagggttgggctgttcgcccattaaagcggtacgcgagctgggttcagaacgtcgtgagacagttcggtccctatccgtcgcgggcgcaggaaatttgagaggagctgtccttagtacgagaggaccgggatggacgcaccgctggtgtaccagttgttctgccaagggcatcgctgggtagctatgtgcggacgggataagtgctgaaagcatctaagcatgaagcccccctcaagatgagatttcccattccgcaaggaagtaagatccctgaaagatgatcaggttgataggtctgaggtggaagtgtggcgacacatggagctgacagatactaatcgatcgaggacttaaccaatttgaatgtatgcttactgttatctagttttgagagaacactctcaatggtttggtggcgatagcgaagaggtcacacccgttcccatgccgaacacggaagttaagctcttcagcgccgatggtagtcgggggtttccccctgtgagagtaggacgccgccaagctatcattacggtaaaggcagctcattatgagctgccttttttgtttttgaataaaaacaaaacaaacaccgaaatacggaaacgcccatatactaattgcaaacttcaaaaaggtccaaattgtgtatacaatcaacagcttaagggaaggctattcatacggaggtgggcaaaatgaatgaaacgtccagccatgaagaaacatgtattgtgtgtgaaaccaaaaaaagcaggggaatccatatttatacgaaatttatatgtttagagtgtgagaagaaagtagtttccactccgacctctgatccaaattatgaatttttcgttcgtaaactgaaaagccttcatacaccgacgttatattcttaaccctgaaaagggtctttttttttgcctgaaatcagaggagtttttacactttttataaaagaactgatacgataagaagaggaacttgtttagacatggaatgtaatagataatactgataaaagtgaataaataggagtcgatcaagtatgaaaccgtttattcaatatatgaaatggacgctttgcggcggcacagtttttgtattagcggggataaccttctttacgatagggcatcagccttttctgtattcgcttttatacggggcagccggcggagccgctgtcagtgcggccggcctgtggaatgcgaagcgtctctttttaaaaaaacaccggctgacaagaaaagaatatgcttatattaaggaaaatcttgaggaagcaaagggtaaaatcatccgattacgcagggcgctttttcgctctaaaagtatacaaatgctgaagcagaatgcagagatactgcggataacccggcgaatatatctgctcacaaagcaagagccgaagcgtttttatcaggcagagcgtttctattatcaaacgcttgattctgttgtagaactgacggaaaagtatgctctgctctcatcacagccgcgaaaaaataaagatttatcaatgtctttgagtgagacgaggatgactctggcagagctttccagaaggctggaagaggatcttcatgaactgatgaaggaggacatcgacgacctgcactttgaattagatgtggcaaagcattcactgagaaaataagaaaggaagaaggaaatggccaaagaccgttccgacgacagcatgggcgcccaaaatgaccagacccctctaaagcttgcagatacgctgccggaagaaaaaagagaagcggcacttcagctcgctgaaaaactggaccctgagaacatgcaaagcattgtactgtttggttcacaggcgcaggcgaatcttctggaattttcccacacgatgatagagcacgttcaaagaaaagatgcaggagagatgggacagatactggctgatttgatgctgaagcttgaccaggtcaaccctgatgatctgcagatgaagaacaaagggtttttcgccaggctgtttaaaagggtgtccggttctgtacaggaagtgctttcgaaatatcaaaagacaagtgtgcagattgaccgtatcagcagaaggctggaacattctaaaaatgtgctgttgagtgacaataaattgttagatcagctgtacgcccaaaataaacagtactttactgatttaactatgtatatagcagcgggggaattaaaattagatgagctgaaaacaaagctgatacccgaagcggcaagaaaagccgaattacaagaacacaatcaaatggccgcgcaggaagtgaatgatcttcgccagtttgccgaccgtctggataagagggtgcatgatctgctgctgagcaggcagattacgcttcagagtgcgccgcaaatccgcctgattcaaaacacaaatcaggcactggcagagaaaattcagtcctccattgttacggctattcctttatggaagaatcaagtcgccatcgcgctgacgcttatgaggcagcggagtgcggcagatgtgcagcagaaggcggcggatacgacaaatcaattgctgctgaaaaacgctgaacttctgaaaacaagtacagtcgagaccgcgaaagccaatgagcgcggacttgttgaggcagaaaccctcaaaaaagtgcaggaaagcttagtcagcacacttgaagaaatcatgtctattcaagaagaaggcaggatgaaacgcaggcgtgccgaggaggagcttgttatcatggaaggcgatttaaaaaagaagctgcttgatatgagatccggccgggataacggctagatgccaaaaagtcttagctttaagttggctcgcaggcacgatataataagaaagacaggcaaaggatttgtttaaaaatggacacacctttatatacagcgctgatgaagcatgcgcaccgaaatacgtattcttttcatgttccgggacatcacaatggagatgtcttttttgatgaagccaaatctgtatatcaatctcttttatctattgatatgactgagatcacgggtcttgatgacttgcatcacccgacgggggtcattaaggaagcgcaggatttggtgagcagattttacggctctcaggaaagtttctttctcgtcaatggaacgaccgccggcaatctggcgatgattttagctgtgtgtgaaccgggtgaacccattctgatccagcgtaattgtcacaagtctgttttccatgcggcggcattggccggagccaagccggtttatttggcgccggaaatcgatgaaaacatgcatgtgccggcacatgtatccctttcagtcatcgaaaaagcgctggcgtcatatccgaacgcgaaaggacttgttctgaccaatccgacttactacggacacgccgccgatttgaccgcggcagttaacaaagcccattcatacggcgttcctgtactggtggatgaggcacatggggctcactttgtgttaggccggcctttcccgccttcatcattggctatgggggcagacgccgttgttcaatcggctcacaaaacgcttccggctatgacgatggggtcttactttcatttgaacagcaccagaattgacagagatcgattaacttattatgtaagcagtttgcaaagcagcagcccgtcatacccgattatggcatctttagatacggcgcgcgcttatgtgcaggatattgctgaaaaagggacacttcccgttcatatggagcgcattgagaaaatcaaacgaaggttcgcatcaatttcttctattgaaataatcgagccttccggatatgggctgcgggcggacccgttaaaattaattcttcggtcaaagctcggacattccggctattcattacaacggattttggagagtgaaggcattgttgccgagctggctgacgagtaccaagtattgctcgtactgccgataggcggccggcggatgatagaacaggcaaccgtaagaaacatacagcagaaactggagaatacaccgcccgataaattgccggatgccgtgaagtggacatttccgtccatatcgacacttgaatacccgcaaaatgagatgcggaagtttacaaaagagcctgcagatataaataaggcggccgggcgcttgcatgcgggcaacattattccttatccgccgggaattccgctgatcatggacggagaacggataacagaagagatcgtacaaaagctttcccgtttaatcggcatggacgcgcatattcaaggcttgttaaacggggaacaattacttgtctatatagaagaggagaaatcatgagcggtttatttataacatttgaaggtcctgaaggtgcagggaaaacgactgtgcttcaggaaatgaaagagattttgtcggcagaggggctcccggtgacagcgacaagagaaccgggcggcatcgacattgcggaacagatcagagaagtgatcttaaataaaaacaatacactgatggatgcaaaaacggaggcgctgctttacgctgcggcgagaagacagcatttagtcgaaaaggtgcagcctgcattgaaagaaggccgcattgtgctgtgcgatcgtttcattgacagttctctggcttaccaaggctatgcgagagggctcgggattgatgaagttctttctatcaaccagtttgcaatcggcgatacgatgcctgatgttaccatctatttttctattgagccggaagaagggttgaaacggattacgtcgaatgattcaagagagaagaatcgtctcgatcttgaggccctgcactttcatacgaaagtacgggaaggataccaaaaggtaatgcagcgttttccggaaagattccatacaatcgacgcatcgaaaaagaaggaactcgtcattcaggacgcacttcaagtgataaatgaagcattgaaaaaaattcagttgtgacctgtttctcataagttgctataatgaatgtaacgataatgttctttccaacctaaagggggcctagagaatgaaactaatagtggcagtggtgcaggatcaggacagcaacaggcttttgaaagtattaaccgaccacaacttcagggtgacgaagcttgcgacaacaggcggattccttaaatcaggcaatacgacgtttatgatcggggtggaagatatccgtgttgataaagcgctcagcctcattaaagagaatggctgtaaacgtgatcagatgattgccccggtatccccgatgggcgggaatgcggattcctacgttccatatcccgtcgaagtggaagtcggcggagcgacggtctttgtcctcccggtcgatgaatttcatcaattttaaggatttgacgacgtgaaaataaattctgacttacgtacatttattgagaaaaagcagcagcctgcttataaagcggcagagctttccggaacatttaaaagttcaatggacagccaaagcagcaagctgaaatttgatcagctgagcaggttcttaacggatatagaaacgttcgggaaaaggctgacgaagtcgagaaacttcaaagacttagcgaaattcaaaggattggtaaaacgttttgtaaaagaggccgtagacagcggattatcgcatgagacggagaaaagctttgacctgtacggaagcagccggactctggggcttgtgaaagaaatagatgaaaaactgcttcagctgacagaagaaatgttagatcaggaaaaaccggcaattgatttgctggatcgaatcggagaaataaaaggtttattgattaacctttacacatagagagtgatacaatggcaatatcatggaaggaaatgaccgggcagcagcccagagtgatgcggcttttgcataacagcattgaaaagaaaaggctttctcacgcatatctgtttgaaggcaaaaaaggaacgggcaaattggatgccgcactgcttctcgcaaaaagctttttttgccttgaaggcgggactgagccttgcggggagtgccggaactgtaagcgtattgaatccggaaaccatcccgacctccatgtggttcagcccgacggattatccattaaaaaggctcagatccaatctcttcaggaagagttttctaaaacaggactggaatcgcataaaaagctgtacattatatcccatgcggatcaaatgacgacaaatgcggcaaacagtctgctgaaatttttagaggagccgagtcaagataccatcgcaattcttattactgagcagcttcaccgaatactggataccatcgtttcgagatgtcaggttcttccgttccagccgcttcagccgaaagccatagaggaaagactgattgaacaggaagtgagccttcacatggcccggctcttagcaaatatgacaaataatattgcggaagcagtcgaattaagtcgaaatgatgagtttgcagagtccagagcgaaagtgataaaattgtatgaagtcttacatcagcggaaaggacatgcctttttcttcattcaggatcagtgggtgccctttttcaaagaaaaaacccatcaagaaatgggtcttgatatgctcttattgatataccgtgatgtattatccatccaaattggaaatgaagataaactgatttatcaagacttattccaatcaataaaacagcatgcgctgcaatttacacaacaaagcgttacgaaccaaattctcgctgttttagaagcaaaaaaacggcttcattccaatgtgaatgtgcagggattaatggagcacttggtgttaacgttgcaggagggataagcttgtacaacgtaataggcgtccgctttaaaaaagcggggaaaatttattattttgatccgaacggatttgatatagaacaagacagctgcgtcattgttgaaaccgtaagaggtgtcgaatacgggcaggttgtcatcgcaaataaacaagtggacgagcatgatgttgtgcttccgcttcgaaaggtcatacgcgttgctgatgaacgcgatcttctcattgtagaagaaaacaaacaggaggccctgtccgcttttgaagtgtgtcagaaaaaagtggctgaccacggcttagatatgaagctggttgatgttgagtttacatttgaccgcaataaagtcattttttactttacagcagacggacgggttgatttcagggaattggtcaaagacttggcttctatctttaaaacgagaatcgaattgcgccaaatcggggtgagggacgaggcgaaaatgctcggcggtatcggaccatgcgggagaatgctttgctgctccacgttcctcggtgattttgaaccggtgtccatcaaaatggcgaaggatcaaaatttatcgttgaacccaacgaagatttccggtctgtgcggccgtttgatgtgctgtttgaagtacgaaaatgatgagtatgagacggcaaaagaacagctgccggatttaggcgaaatgattacgacggcaaacggccccgcaaaggttgtcggtcttaatattctggaacgggtgcttcaggtggaactgaagaatcgtgaaaaagtgatagaatatacttgggaagagctcttggaagagggcgtcgtatccgcacaaaccacagattaacgaggtgtggaaccttggataaaaaagagttatttgatactgtcataaacctggaggaacaaatcggttcgctgtaccgtcagctgggtgacttaaagcagcatatcggcgaaatgattgaagagaatcaccatcttcagcttgaaaataagcatttgcgtaaacggcttgatgatacgacagagcaaattgagaaattcaaagccgatcagaaagaaacaaaaacacagaaggcagagcagagtgatataggagaagggtacgacaatctggcccggctgtatcaagaaggctttcatatttgcaacgtccattatgggagcgtccgcaagggagattgccttttttgtctgtctttcttaaataaaaaataaggaaaaggcttccgctgatgtcggaagcctttttcaaagagtgccgaaaggaataagattatggtttcattacgtgatgatgaaagattggattacttattagcagaggatatgaaaatagtacagagtccgacggttttcgctttttcattagatgccgtgctgctgtctaagtttgcatacgttccgattcaaaaggggaacatcgttgatttatgcacggggaacggcattgtgccgcttttgctcagcacaaggtcaaaagccgatatcaccggggttgaaattcaggaacgcttgtatgatatggcgctccgaagcgtggaatacaacgggctgggcggtcagatcagtctcattcatgatgatctgaaaaatatgccggaaagactcggacataataaatatgatgttgtcacctgcaatccgccttattttaaaacaccgaaagaggcggagcagaacctgaacgagcatctcagaatcgcaaggcacgaaattctttgcacgcttgaagatgtgatttccgtcagcagcaaactgctgaagcaaggcggaaaagcggctctcgttcatcggccggggaggcttttggaaatctttgaattaatgaaagcgtaccgaatagaaccgaaacgggttcagtttatttatccgaaacaaggtaaagaagcgaataccattttggttgaaggaattaaaggcggccgccctgatctcaaaattcttcccccgctgttcgtatacaatgaacaaaatgaatatacgaaagagatccgcacgattttatatggagacaaatagtcatttcttttatgtgctgctgtgcaatgacaacagtctgtatgccggttatacaaatgatctgcaaaaacggctgaaaacccacaatgagggaaagggtgcgaagtacacaagggcgcggcggccggtttcgttatgccatgcggaatcatttgaaacaaaacgggaagcgatgcaggcggaataccgttttaaacagctgacccgaaagaaaaaagagcaatatatagaagaaaaacgacgcagcaaggaggctgtatatgttaagacgccagatgagttttaacggaaaatctgaaatgggaactctgtaccttgttcctacaccgatcggcaatttggaggacatgacctttcgtgcagtagagacgctgaaatcggccgatgtcatagctgccgaagatacgagacagacgaaaaagctgtgccatgtttatgatatagaaacatctctcatcagctatcatgaacataataaagaaagcagcggccataaaatcattgaatggctgaaaaacggaaagaatgtggcattggtcagtgatgccggcatgccgacaatttccgacccgggggctgagattgtgagagatttcacccaaatcggcggatatgtcgttccgcttccgggtgctaatgcggcattaaccgcgctgaccgcatcaggcatcaccccgcagccgtttttcttctacggatttttaaacagacagaaaaaagaaaagaagaaagaactcgaaatcctgaaaaaacggcaggaaacgatgatattttacgaagcgccgcacagattaaaagaaacattaacagcaatgcatgatgttttgggtaatcgaaccatcgccgtcacgagagaattaacgaaaaagtacgaggaattcatcagaggaaccatcgccgaggtgatggaatgggcaaatgaagatcaaatccgcggtgagttctgtctagttgtcgaaggaaatcaaaccgctgaaccggatgaagaggaaaagccttggtggacggagctttctgagaaagaacatgtggagcattacataaatgaaggatcttcttccaaacaggccataaaacaaacagcggtagatcgggacgtgccgaaacgcgagatttatgacgcttatcacattcaatcataaaaaaaaccgttcttgtatcgtaacaagaacggtttttgtatgaaatagcttatttttggttttgaagctggttttgaatttcagagatgatttgctcagcgccctctttgctgagtaccaatttgccgccggcaagtttaaggttatcgtcagaaacttcaccagttacttggcaagtcatgtttggtttatattttttaaggatgattttttcatcatcaacataaatttcaagagcgtctttttctgcgatgcccagtgtacggcgaagttcgattgggataactacgcgtccaagttcatcaactttacgtacgataccagtagatttcattaacagtctcctcccgagagataattatttgtagtttatatttttcttcgtcattattcgacaaaattccttacattcctagcataacaaggtttccaataatcgtcaatctttttgtttgctattgtttgtaagaattagttcttatagtaagtaaagccttggaaatcctgaaataacaggctttttgactgctttttcgaacctattatcctactgaaaatccttttaaatcaagactttcgaaccaagatgttttatattagtagattataaacgacaaaattcgacatgttaagactttttttaatttcaataaaaatttttaattttatttactcttttacgcgcagtacgtatatatccttgatcttaaaggctaagatggtatcatagatagaggacaaatatcaatattgtatatcaaataaaaccgctctcgtcctttgggcgtgagcttttcgacattctgaatgggaggttgcaacatgccgcaagacaataatactttttatattacaaccccgatatattatccgagcggaaaattacatatcggccatgcttatactaccgtggccggcgatgcgatggcgcgttacaaaagattaaaaggatttgacgtacgctacttaaccggaacggatgagcacggacagaaaatccagcagaaagcggaggaagagaatatcacgcctcaagcttatgtggatcgtgcagttgctgaaatccaaaaactatggaagcagctcgacatttctcacgatgatttcatccggacgacggaaagccggcacaaagaaattatcgagaaagtgtttcaaaaacttcttgataatggtgacatttacctggatgagtatgagggctggtacagcatccctgatgaaacattctatacggaaacacagctggtggatgtggaaagaaatgagaagggtgaggttgtcggcggaaaaagcccggacagcggccatccggtcgaattaatcaaagaggagtcatacttcttccgcatgagcaaatacgcagaccgcctgctgaagttttatgaggaaaatccttctttcatccagcctgaatcacgcaaaaatgaaatgattaacaacttcattaaaccggggcttgaagacttggccgtttccagaacgacgttcgactggggcgtaaaagtgccgggaaatccgaagcatgtcgtgtatgtatggattgacgcactgttcaactatattacagcgctcggttatgatacggaaaatgatgagctttacaaaaagtactggccggctgacgtccaccttgtcggtaaagaaattgtccgttttcataccatttactggccgattatgctgatggcgcttgatctcccgctgcctaagcaagtattcgcgcatggctggttattgatgaaagacggaaaaatgtcgaaatcaaaaggaaatgtcgttgatccggtaacgttaattgaacgctacggattggatgaacttcgctattacctgcttcgcgaagtaccgttcggttcagacggtgtctttacgccggaaggtttcgtagaacggattaattatgacttggcgaacgacttaggaaaccttctgaatcgtacagttgcaatgatccaaaaatattttgacggtgagattggttcatatgaaggaaatgtgaccgattttgattcagagctttcttctgtagccggtgaaacggttaaagcttatgaaaaggcaatggaaaacatggagttttcagtcgctttatcaacgctatggcaattaatcagccgtacgaacaaatatattgatgaaactgctccgtgggtgcttgctaaagatcaggaaaaagaaaaagaattacgttccgtcatgtatcatttagctgaatctttacgtatctcagccgtattgctccagcctttcttgacacaaacgcctgaaaaaatgtttgcccagctaggagttgaggatcagtcccttaaagcatgggacagcattcagacattcggtcaattgaagaacgcgaaagtgaaaaaaggggaaccgcttttccctcgtcttgaagctgaagaggaagtagcttacatcaagcaaaaaatgcaaggaactgctcctgctaaagaagaaaagacggaagagccgcaagaagcagagcgtcttcctgaaattacgtttgatcaatttatggatacagaacttcgcgtcgcagaagtcttgtccgcagagccggtgaaaaaagcagatcggctgctgaaattgcaaattgatctgggctttgaacagcgccaagttgtatcaggtatcgcgaagcattacacacctgatcagcttgtgggaatgaagatcatttgtgtaacgaatttaaaaccggtaaaactgagaggcgagctttctcaaggaatgatactggcaggagaatcagacggcgttctcaaagttgtagctgtcgaccagtcattaccgaaaggcactcgaattaaataaatagatgcaaaaggtgtttcacgtgtaacattccgtcgaacaccttttgtttttcaacaagaaaggagtttttatgatgctttttgatacacatgcgcacttaaatgccgagcaatttgacacagacttagaggaagtcattgcgcgtgcaaaggctgaagaagttgaacgaatcgtcgttgtcggcttcgacaaacccactatcacgcgtgcgatggagctgattgaggaatacgactttatatacgctgcgatcggctggcatccggtagacgcaattgacatgacagaggaagatttatcatggattaaggaactgtcctctcacgaaaaagttgtggcaatcggagagatgggccttgattaccactgggataaatcaccaaaagacattcagaaagaagtattccggaaacaaatcgctctcgccaaagaagtgaaccttccaattatcattcataatcgtgatgcaacggaagatgttgtcacgattttgaaagaagagggggcggaagaagtcggcggtattatgcactgctttacggggagcgcggaggttgcgcggcagtgtatggatatgaatttttatatttcattcggcggaccggttaccttcaaaaatgcaaagaaaccaaaagaagcagcaaaggaaattccgaatgaccgtttgctgattgaaacggactgtcctttcctgacaccgcatcctttccgcggtaaacgaaatgagccaagctacgtaaaatatgttgctgaacagctcgctgaattaaaagggctgacatatgaagaaattgcctcaattacaactgaaaacgcaaaaagacttttccgcatgaactgacagaatgcgctgtcgtaacgtgtaaaggcttgtccgattcagtggatatgtaaaacggttctacaagcttccttctcctcataagataggttgtcgatatgtctctcttcctttttttgctttgtttttgcataatgagggatacgctgaaggtttttcatcttcgagatgggagggttgacagcattttagatactctatataatctctccgaggagaaggaggcgtttttcatcacacaaaaaatgaaaaaactgttttccgtaaagcttggtaaaagcaaggttattcttattgcagctattattctgctgggcggaaccgggactgcatacggggcacatgagctctcaaaacaatcagtttctgtttccatcaacggcaagaaaaagcaaatacgcactcatgcaaaaacggttggggaacttctggaagatttacatatagagacgagaaatgaagaccggattaccccgtctaagcagacagcattggcagacaacatgaatgtcgtgtatgaagctgcaaagcagatccgtgtgacaagaggcggagaagaaaagactttatggtcaacggcaaaaacagtcggcgcatttctgaatgaacagcatacacctgtgaatcagcacgataaaatagatccagcagcagatacgaaagtgacaaacggcatgaaagtcacggtcgacccggcttttcgggtcactgtaaatgatgcgggaaagaaaaagaaaatatggacgacttcgactacggtcgctgactttttaacgcagcataagatggacatgaaagacgaagataaagtaaaaccggcattacacgaaaagctcacaaaaaatcaggccggcatacaaatcactcgtatcgaaaaagtcaccgatgtagttgaggaaaaaatagcgtatcaagtgaaagaaaaagaagatgcgtctctcgacagcgggaaagaaaagatcgttcaaaaaggaaaagaaggcaaacttaaaaagcattttcatgttgtcaaagaaaatggaaaagaagtttcaagaaagcttgttaaagaagaaacatctgaaaaaagcaaagatcaaatcattgcggtcggcacaaagcggcacagtcccaagattgagcagctcagtgcacctgtgaaggcatcttctggcgaaaccggatcttccggtaaagtgattaccgtgtcttccacggcttataccgcaagctgcagcggctgttccggccatacggctacaggcgttaacctgacaagcaatccgaatgctaaagtcattgcggtagacccaagcgtcattccgctcggcacaagagtccacgtagacggatacggggatgccgtggccgctgatacaggctcagccattaaaggaagacggattgatgtctttttccctgaaaaatcttcagcttaccgctggggaaagaaacaggtcaaaataaaaatcttaaattaattccgattcactcagagggttttgcgccctctgtttttttcgttataataggtaaagtgtattttcagtatattagacgtgacatgtaagcaaaggtttcgttttggatataaaaagtttttttggaggaagtaatgaaaattaaagaaattattgtagtcgagggacgcgatgacactgcgcgcataaaacttgccgttgatgcggatacgatcgagacaaacggttccgcaatcggagacgaagtcatcagacagattcggctggcgcaggaaacgagaggggtcatcgtactgacggacccggattttccgggggaaaagatccggaaaaccatttctgaagcagtacccggctgtaaacacgcatttctgcccaaacatcttgccaaaccgaaaaacaagcgcggcattggcgttgagcacgcatccattgaaagcatcagagcatgtctggaaaatgtgcatgaagagatggaggcaaagccgagtgagatttcagctgaagatgtcatacaggccggtctgatcggcggaccggctgccaaaagacgccgcgaacgattgggcgacctgctgaagatcggctatacaaacggcaagcagcttcaaaaacggctgcaaatgtttcaaatcaaaagaagtgattttattgatgcgctcgatgctatgaggcaggaggaacaggatgaacaataaagatatcgcgacacctatcagaacgaaggaaattctgaaaaagtacggtttctcttttaaaaagagtctggggcagaatttcttaattgatacaaatatattggacagaattgtggaccatgcggaaattacggatcggaccggagtcattgaaatcgggcccggaatcggcgcgctgacagagcagcttgccaaacgggcaaaaaaggtcgtcgcgtttgaaattgatcagcgcctgctgcccattctcaatgatacgctgtctccgtatgacaatgtaacgatcattcatcaagatgtgctgaaagcagacgtcaaatctgtcattgaagagcagtttcaggattgtgatgaaattatggtgacggcgaatctcccatattatgtgacgacgccgatcatcatgaagcttttggaagaacatcttccgttaaaaggaattgtcgtgatgctgcaaaaagaggtcgctgagcgaatggccgctgatccttcctctaaggagtacggatcgctttccattgcggttcagttctatacggaggccaaaaccgtcatgaccgtcccgaaaacggtgtttgtgcctcagcctaatgtcgattctgccgtcatccgtctcttgcttcgtgacggcccggcggttgacgtcgataatgaaccgtttttcttccagctgattaaagcaagcttcgcacagcgccggaaaaccttgcttaacaaccttgtgaacaatcttccgggcggaaaagagaaaaaagctcaaattgaagaagttcttcaagaaacgaatattgacggaaagcggcgcggtgaatccctgtccatagaagaattcgcgctcctgtccaacggattgcataaagcccttttctaagagggctttttgttttgcgtcaccacttggactgccgctacataggctagaggagaaccttattcattcaactgcaagaaaagcttgaaacatcaagcgccgcagcggaaagaggtgtatttgccaagacttctttcatgatgaggcttagtctatttgtggagtgggtaacgtgcaatttcaaataggagatatggtagccaggaaatcctatcaaatggatgttttatttcgcattatcggtatagaacaaacaagcaacggaaattcaattgccatcctgcatggtgacgaagtcagattgattgcggatgctgatttttctgatttggagcctgtcagaaaagacgaacaggccatgagaaagaaaagagatgaaagcaggatgaatgaatctctcgagctgctccgccaggattataagctgcttcgggaaaaacaggaatattatgcgacaaatcaatatcagcatcaggagcactactttcatatgcccggaaaggtattgcatctggacggcgatgaggcctatttgaaaaagtgcctgaacttttatgaaaaaatcggtgtgccggtatacggaattcattgccatgagaaaaaaatgccggcatcaattgacgagctgcttgataaatacaggccggatattttagtcatcaccggccatgatgcatattccaagcataagggaggcgtgaacgatttaagcgcctacaggcattccaaacactttgtcgaaaccgttcaaagagcgaggcgtaaagtccctcatttggatcagctggtcatattcgcgggggcgtgccaatctcatttcgagtctttaatcagagcgggcgcgaatttcgcaagttcgccgtcacgcgtcaatatccacgcgcttgacccggtatatattgtcgcgaaaatcagcttcactccgtttatggagcggatcaatgtatgggatgttctgagaaatacgctgacgagagagaaagggctgggaggaattgaaacgaagggtgtgctgcgtgtcggtatgccgtataaatcaaatggatgagtgataaaacccgcatatatttcgctatgcgggttaattattttacatattgatacataaatttccggaacttgtgaaaaataacgcagaaatcaatagaattttgtcaaaataattttgttgacaatgacttattaacgttgatataatttaaattttatttgacaaaattgggctcttgttgtacaataaatgtagtgaggtggatgcaatggcgaagacgttgtccgatataaaaagatcgcttgatgggaatttaggtaaacggcttacgttaaaagcaaacggcggccgccgaaaaacgattgagcgttcgggcattttagctgagacgtacccttctgtttttgtgatacaactagatcaagacgagaattcgtttgaaagagtttcatacagttatgctgatattctgactgagactgttgaattgacattcaatgacgatgcggcaagctcagtagcattttaatgggcagtgaaccttttgtttactgctttttgttttgccttctaaagctcttctaattattccctcgaaagtttcagccgattaaacggaagctataagtgtcacatgttttatcgtggcgtgcacgaatggtgatcaattctataaaaggggttgtttcgtttgggcagacgtcgtggagttatgtcagatgagttcaaatatgagctggcgaaggaccttggtttttacgatacggtgaaaaacgagggctggggaggcattcgggcgcgtgacgccgggaatatggtaaagcgcgcgattgagattgccgaacagcagatggcggctcagaaccaaaataaccgataatgcagtggcccgggggacaatccgttccccggttttttctatcggctgtcaaaaccggcttcaatttcggataagtacctccgggtctccaaatgtgatacaatgttcatacttatgtttagatggagaagtaggtgaaagctatgcgtattttagaaaaagcgccggccaaaatcaatctgtccctcgatgtgacgagtaaacgcccggatggttatcacgaagtggagatgatcatgacgacaattgatttggcagatcggattgaactgacagaactgcccgaaaacgttatcagagtggcgtcgcataatcgctttgttccggatgatcaaaggaatctggcttatcaggcagccaaactgcttaaagaacgatttcaagtcaaaaaaggcgtttccattatgattacaaaagtgatccctgtagcggcagggcttgccggcggaagcagcgatgcggcagccacgctcagagggctgaacaggctttgggatttaaagctttctgtcgaagagctcgcggagcttggagctgaaatcggttcagacgtgtccttctgtgtatacgggggcactgctctggcaaccggacgcggtgagaagatcaggcacatcagtgctccgcctcattgctgggtcgtgcttgccaaaccgacgatcggggtatcgactgccgaagtgtaccgccggctgaacttacagcaggttcggcatcctgatgtgcaggcgatgattgacgcgattgaagaaaaaagcttccaaaaggtatgcggacaattaggaaacgtattggagtcggttacgctcagcctccatcccgaggtggcgatgattaaaaatcaaatgaaacgcttcggcgctgatgcggtgttaatgagcggaagcggaccgactgtattcggtttggttcaatacgaatcgaaggtgcagcggatttataacgggttaagaggtttctgtgatcaagtgtacgcggtgcggatgatcggcgaacagaatgctcttgattaaatccgtatgttaagttatattatttttaaattattcggattttgggggtaagttcatgaagtttcgtcgcagcggcagattggtggacttaacaaattatttgttaacccatccgcatgaattaataccgttaacgtttttctcagaacggtatcaatcagcaaagtcatcaatcagtgaagatttaacgattattaaacagacctttgaacagcaaggcattgggacgctgcttacagtgccgggagctgccggaggcgtcaaatacattccgaaagtgaaacaggctgaagcagaagcgtttatacaggagctgggacagtctttagtaaatcctgagcgtatccttccgggcggttatgtatatttaacggatatcttaggaaaaccatctgtcctctctcatgtaggcaggctttttgcttccgtttttgcggagcgggagattgatgtggtgatgaccgttgcgacaaaaggaatccctcttgcttacgcagcggccagttatctgaacgttccggttgtcatcgtgcgaaaagacaataaggtgacggaaggctccacggtgagcatcaattatgtatcagggtcgtctaaccgcattcaaacgatgtcgcttgcgaaaagaagtttggctacgggttcgaacgttttgattattgacgattttatgaaagccggcggcaccattaacggcatgatcagcctgcttgatgagtttaacgcaaacgtcgcgggaataggcgtcttggttgaagccgagggagtgaatgaacggcttgtcgatgaatacatgtcactgctcacgctttcaaccatcaatatgaaagacaaaacgattgagattcaaaacggcaattttctgcgattttttaaagaacagcatttaaagaatggggagacagaaaaatgacaaaagcaatccatacaaaacacgcgccggcagcgatcgggccatattcacagggaatcatcgtaaacaacatgttttacagctcaggccagattcctcttactgctgaaggagaaatggtaaacggtgatatcacagaacaaacgcatcaggtgttcagcaatttaaaagctgtgctgaaagaagcgggcgcttctctcgagacggttgtcaaagcaacggtgtttattgctgatatggagcagtttgcggaagtgaatgaagtgtacggacaatactttgatgtacataagccggcaaggtcttgtgtggaagtggcgagactgccgaaagacgctctcgtggaaattgaagtcattgcgctggtgaaatcttaaatctcagaaaagtggttccggtctccgggatcactttttttatgcagtatatgatccccaaatatggtttatcacctaattgtgtatgtatatcctatattttcaaaaaaactttttgaaacgtgcaggaatttaaaaagaatcgtggaattgttagactaatgcttttatatagggaaaaggtggtgaactactgtggaagttactgacgtaagattacgccgcgtgaataccgatggtcgcatgagagcgattgcatccatcacgctggatcacgaatttgtcgtacatgatattcgtgtgattgatggaaacaatggtcttttcgttgcgatgccgagtaaacgcacccctgatggagaattccgcgatattgctcatcctattaattccagcacgcggggcaagatccaggatgctgttttaaatgagtatcatcgtttgggtgattctgaagcattagaatatgaagaagccggggcttcttaaacataacaaaatgtaaggactgctgataaaggctgacacaaggccttttccggcagtccttttttaaatctgatttttcagtaataaagcgattacatagaaaattcttgcactttttgatgtcttcttgaaatcaacagctatttaggatatatttttctatggataaaagggatattggaggccattaaatggataagcggtttgcagtgattttagctgccggaaaaggaacgagaatgaaatcgaagctttacaaggtccttcatccggtatgcggaaagcctatggtagagcacgtcgcagacgaagctctgaaattatctttagcgaagcttgtcaccatcgtaggacacggcgccgaagatgtgaagaagcagctcggacagaaaagcgattacgctctccaagcagaacagctcggtacggctcatgcggtcaaacaggcaaaaccatttcttcacggagaaaagggtgtcacgatcgttatttgcggcgatacaccgcttctgacggcggagacgatggaagccatgctgaatgaacatacagacaaaggtgcaaaagccacggtgttaacggccgttgccgacgatcccgccggatacggaagaatcatccgcagtgaagacggcgccgttcaaaaaatcgtggagcacaaggatgcttcggagcaagaacgtcttgtgaaagaaattaacacgggaacgtactgttttgataacgaggctctttttcgtgtcatcgaacaggtttcgaatgaaaatgcccaaggcgagtattatctgccggatgtgatcgaaatcctcaaagacgaaggcgaaactgttgccgcttaccagactggtaacttccaagagacgctcggagtgaatgatagagtcgctctttctgaggctgaaatgtatatgaaagagcgtattaacaaacggcatatgcagaacggagtcactttaatcgatccgatgaatacgtacatctcacctgacgcacgtatcggacaagatacagttatttatccaggaactgtgttaaagggacaagctgaaatcggcgatgaatgcgtcatcggcccccacactgagatagaggacagctcaatcggcagccgcactgtgattaaacaatccgttgtcaatcgcagcaaagttgggaatgatgtaaatatcggtccttttgctcacatcagacccgattccgcaatcggcaatgaagtgaagatcggaaactttgttgaaatcaagaaaacacaattcggcgaccgaagcaaagcatctcatttaagctatatcggtgatgccgaagtgggcacggatgtgaatctgggctgcggctccatcacggtcaattatgatgggaagaaaaagtatttaaccaaaattgaagacggcgcctttattggctgcaactccaatctggtcgctcctgttacagtgggagaaggcgcgtacgtcgctgcgggttcaaccgtaactgaagatgtgccgggcgaagcgcttgccattgccagagcaagacaagtaaataaagaagattatgtgaaaaacattcataaaaaataatcctaaaatcggaggtttaccatgtctaacgaatacggagataagaatttaaagattttttctttgaattcaaatccagaacttgcaaaagaaatcgcggataatgtaggggttcaattaggaaagtgctctgttacaagattcagtgacggagaggtccagatcaacatagaagaaagtattcgcggctgtgattgctatatcattcagtctacaagtgcgccggtcaacgagcacatcatggaattgctgattatggttgacgctttaaagcgcgcttccgcgaaaacaatcaacattgtcattccgtactacggttatgcgcgccaggacagaaaagcaagatcacgtgaaccgattacggcaaaactttttgcaaacctgcttgaaacagcgggtgcgacacgcgtgatcgcgcttgatttacacgcgccgcaaattcaaggtttctttgatattccgattgaccacttaatgggtgttccgattttaggccattactttgaaggtaaagacttgaaagatatcgttattgtttctcctgaccacggcggtgtgacgcgcgcccgcaaacttgcggaccgtctgaaagcgccgatcgcgattatcgacaaacgccgtcctagaccgaatgaggtagaagtgatgaacatcgtcggtaacgttgaaggtaaaacagcgattctgatcgatgatattattgatacggccggcacaatcacacttgccgctaacgcgctggttgaaaatggagctgcagaagtgtatgcatgctgtacgcaccctgtactgtcaggccctgccgttgagcggatcaataactctaaaatcaaggagcttgtcgtaacgaacagtattaagcttcctgatgagaaaaaaatcgaacgctttaagcagctttctgtcggaccgcttctggctgaagcgattatccgcgttcacgagaaacaatctgtcagctatttattcagctaaaccgaaactttaaggtttaaatcccagttattgtgggtattgttctaataggacgataaaacgataattaggatggtgctgaatatggcaactttaaaagcaaatgaaagaaccgattttaaacgttcgacgcttcggaaaatccgtcattcaggacatgttccagggattatatacggtaaagaaacaacgaatacgcctgtctctttagacagtgtcgaattgcttaaaacattgcgggacgaaggaaaaaacacgattatcacaattgatgttaacggaaatcagcaatcggttatggtgactgatcttcagacagacccgctcaaaaacgaattgacgcacgccgattttcaagtcgtgaatatgagtgaggagctggaggccgaggtgccgattcagctgacgggagaggcgaagggagtcaaagacggaggcgtcatccagcagccgctgcatgagctttcgattaaggctagaccgaaggacatccctcagacaatcaatgttgatatttccggacttgagatgaatgatgtgctgaccatcgcggatctgactgctgacggcaattatacatttacaaacgacccggaagaagtcgtggcttccatccttcctcctaagcaggaagcattcgaagaagatgcagaaccgtctcctggggaagagcccgaaggagaaaatcaataagcgctttaagacgtaacccgcccgaggttacgtcttttgtgctagaatgagaagaattacagcgatgttgagggaggatttacgatgcttgtgattgccggtctcggtaaccccgggaaaacctatgagaacacgagacataatgtcggctttatggccattgacgagctttctaaagaatggaatattgaattgaataaaacgaaattcaacggactttacggaatggggtttgtttccggaaaaaaagttctacttgttaaaccgcttacatatatgaatttatcaggggaatgtttgcggccgctactggattattatgatgccgatcatgaagatctgaaagtcatatacgatgaccttgatcttccgacgggaaaaatcaggctccggacgaaagggagcgcaggcggacataacggaattaaatcgcttatacagcacctcggaacccctgaatttgaccgggtcagaatcggaatcggccgccccgtcaacggaatgaaagtcgttgactatgtactgggagcttttacgaaggaagaagcgccgcatatcaatgatgccgtctcaaaaaccgtaaaagcctgcgaagcttccttaacgaaaccttttttagaagtcatgaacgaatttaatgcaaatgtataagataaataatgggagaccatactagggaaaaatgattttttcacatcaggaggtccaacgtatggctttgcattatttctgccgccactgcggctttaaggtagggagcctggaatattcgacggtgccgacacagtcacttggatttcagcacttaacaaatgaggaaagaaacgatatgatttcatataaagacaatggagatgtccatgttcttacaatttgtgaagactgccaagaggcgctggagcgcaatccgcactaccatgaacacaacacatttattcaataagaagctttggtgtagattctagaccaaagcgtttttctgttcttgcagaaaatagagaggagggcccatatggacaacattcaaacctttattaaagaaagcgatgattttaaatccattgtcaacggtttacatgaggggctgaaggaacagctgcttgcgggcctgtcaggttccgcgcgttctgtttttacctccgcccttgcacaggaaacgaaaaggccgattttctttatcacccataatttatatcaggcccaaaaagtgacggaagatctgacggcgctactcggggatcaatctgtttttttataccccgtgaatgaattgatttcttcagaaattgcggtagcgagccctgaactgcgcgctcagcggcttgatgtcattaatagattaacaaacggagaagcgccggtcgttgtggcgcccgtggcggcagtgagaagaatgcttccgccgaaggagctgtggaaaagcagccagctcgtcatttcactcggagacgaaatagaaccggatcagctgtccgcgcgccttgtagaggtggggtatgagcgttccgacatggtttctgcacccggtgaattcagtattcgcggcggaattatcgacatttatccgctgacgtcggagcatccggtgcgaattgaactgtttgatacggaggtcgattccatcagaagcttcaattctgatgaccagagatcaattgagacgctcaaacatgtggcgatcggaccggcgaaggaattgatcatcagggcggaagaaaaagcccgggcgatggaaaggctcgataaagggcttgccgacagtctgaaaaagctgaagcaggacaaacaaaaggaaatgcttcatatcaatatctcacatgataaagaacggttatcaacgggacagactgatcaggaacttgtgaagtatctctcgtacttttacgaaaaacctgctagtttgctagattatacaccggcagacacgttgttactgttagacgaggtcagccgcattcatgaaatggaggatcagctgcaaaaagaagaggccgaatttacgacaagtctgctcgaggaagggaaaattctgcatgacattcatttatccttcagctttcaggagcttatgagcgaaaagcggcgcccggctatttattattcattatttttgcgtcatgtccagcatacaagccctcagaatatcgtgaacgtgacaagccggcagatgcagagctttcacgggcagatgaatgtgctcgcaggtgaaatggagcgctttaagaaatcaaacttcaccgtcgtctttttaggcgcaaataaggacagaaccgacagattggcatccgttctggctgattacgaaattgaagccgcaaaaacggacagctccaaagcgcttgtgcaaggacaggtctatgtcatggaaggcgagctgcaatccggttttgaactgccgctgatgaagctggccgtcattacggaggaagagctgttcaaaaaccgaattaagaaaaagccgagaaagcagaagctgacaaatgccgaacggatcaaaagctattccgagcttcaggtcggtgactatgtcgtccacgtcaaccacgggatcggtaagtatttggggatcgaaacactagaaatcaaaggcattcataaagattacctcaacattcattatcagggaagcgataagctgtacgtccctgtagaacaaatcgaccaggtgcagaagtacgtcggctctgaaggaaaagaaccgaagctttataaactgggcggcagtgaatggaaacgggtgaagaaaaaagttgaaaactccgttcaggatattgctgatgatctgattaagctttatgcggaacgggaagcaagcaaaggctatgcgttctcgccggatcatgaaatgcagcggcagttcgaatctgctttcccttatcaggaaacagaggaccagctccgttccattcaggagattaaaaaggacatggaaagagagcgcccgatggaccgtttgctttgcggtgatgtcggttacgggaagacggaggtagccatccgagcggcctttaaagcgatcgccgacggaaagcaggtcgcgcttcttgtgccgacgacaatactcgcgcagcagcattatgaaaccattatggagcgtttccaggactatccgattaacatcggtcttctcagccgattcagaacgagaaaagaatccaatgaaacgattaaaggcctgaaaaacggaacggtagacatcgtaatcggaacccacaggctcttatctaaagacgtcgtctataaagatctcggcttgctcatcattgatgaagagcagcgcttcggcgtaacgcataaggaaaaaatcaaacagatcaaagccaatgtcgatgtgctgactcttacagcgacgccgataccgcgtacgcttcatatgtccatgctcggtgtgcgggacttatctgttattgaaacgccgccggaaaaccgtttccctgttcagacatatgtcgtggaatacaacggtgcgcttgtgcgggaagccatcgaaagagaactggcgcgcggaggacaggtatatttcttgtacaaccgcgtggatgacatcgagcggaaggctgatgaaatttccatgcttgttcccgatgcgaaagtggcttatgcccacggaaaaatgaccgaaaatgaattggaaagcgtcatgctcaattttctggaaggggaatcagacgtccttgtcagcacgaccattattgagacaggcgtagatataccaaatgtcaataccttgattgtgttcgacggagacaaaatggggctgtctcagctgtatcagctgagaggacgggtcggccgttccaaccgcgtcgcttatgcgtattttacgtaccgcagagacaaagtgctcactgaggtggcggaaaaacggctgcaggcgattaaagaatttaccgagctgggatcaggctttaaaatcgccatgcgtgacttgacgatcaggggagcggggaaccttctcggcgcgcagcagcacggctttatcgactcagtcggttttgacctgtactcgcaaatgctcaaggaagcgattgaagagcggaaaggcgatattccgaaaagcgaacagtttgagacagaaatcgatatcgagcttgacgcgtatattcctgagaactatatacaagacggcaagcaaaaaatcgacatgtacaaacggttcaggtcaatcgccacaattgaggagaaaaatgagcttcaagatgaaatcatcgacaggttcggcagctaccctaaagaggttgaatggctgtttacggttgctgagatgaaggtatacggaaaatatgaacgcgtcgaactcatcaagcaggataaagacgcgatcagatttaccatttctgaagaggccagcgcacagattgacggccagaaattgttcgaactcggcaataaatacggccggcagatcggactgggaatggaagggaaaaagctgaaaatctcagtacagacgaaaggccgcaaaacggaagagtggctggagaccgtgctcggtatgctgaaaggccttcaggatgtgaagaaagaaacaatcgcgtcttcataaaaattgttactctctggtgtatattacatttgatgtgacggatactaatttcaagcgagtggcggaagctacataaagtaaagagctttagtactttcccttaaatatcatcacatgaaagagaggcaccagagagatgaaagctacaggtatcgtacgtcgtattgatgatctaggacgggtcgtcattcctaaagaaattcggagaacactgcgaatcagggaaggagacccgcttgaaatattcgttgaccgcgacggagaagttatattgaaaaaatattctcctatcagtgagcttggcgattttgcgaaggaatatgcagatgctttgtatgacagtctcggccattccgtcttgatttgcgaccgtgacgcgtatattgccgtttcaggcagttcgaaaaaagaatttctgaacaaagccatcagcgatttgctcgaaaaaacgatggatcagcgcagctcagtggtagaaaacgacgtgaagtccgcgcagcttgttaatgacattgatgaagatatgagctcctatacaatagctccgatcgtggcaaatggcgatcctattggtgccgtggtcatcttttccaaggaacaggcacttggagaagtagaacataaagcggtagaaacggcagccagttttttggcgagacaaatggagcagtaggtcttattaccattattgaaataagaaaacggagaaagagcagctcttatacaagtgctgttcttttttatattcatatgtgctctctatcggttcggccgttaggattgtgatataataagctcgttttatagacgtaattttctagcggctggaaggagcttttggatgaacgattcagttggcgccaagcggcaatcggcatggaaaggtgcttttgtgctcgtcgttgcgggcatcgtgacgaagatattaagcgccgtgtacagggttccttttcagaatattgtcggtgacgtcggattttacatttatcagcaggtgtatccgtttttagggatcgcggtcatgctgtcaacatccggttttccggtaatcatctcaaaattaatgaacgattatagcgatcataaacaaaaaataatgaaaatttccgccctttatgtcacggcggccggacttgttctgtttgcgctcatgtatgccggcgcggcgccgttggccggttttatgggtgacgaccgccttgtgatgctgataagggtcgcggcgttcgctttcatactgtttccgtttacggcggttttccgggggtatttccaaggcgtgcatgatatgatgccgtcagccttatcccagattacggaacagcttcttcgcgtggcggtgcttctcggtttatccttctggcttttgaaaagcggccgttcattatacgcggctggtgcgggggcggcctcgggatcaattgccgggagcttggcggccctttgtgtattggctgttttctggtataagcgggaagaaaccaagaaagacggcggacatatcgaaacggccgtcattgtaaaaaagctgctgctttattcagtcaccatctgtatcagcagtgtactcatgcttttgattcagcttgtagacgccttaaacttatattcactgctttcagacgggacggagagccatgccgcgaaacagctgaaaggcatatatgaccgcggacagccgctccttcagctgggaaccgtgtttgccgtcagtatcgccgcgtcattggttccttcaatttcaaaagcggtgcatgagaataagccgtttatcataaaagagaaagcgacatcagccgtcaagctctgccttgcggtagggatcggtgcatcagccgggcttttttgcattctagagccggtgaatatcatgcttttccaaaacagtgaggggacgcagaccttacaaatattcagcttatctatcttttttgcctcgattgcgcttacggcagccgcgattctgcaaggagcgggacataccgttttccccgccgtatccgttttggcgggaggggcgctgaaatgggtgctgaatgtttggctggtccccggctggggtattacaggagcggcactggcgaccgtcttggcatttgccgcagttgcgtgcctgaatctccggagaatttggtcgaagggctggctgacgaatatcggaggcgtgattgcccgtctgtgctggtgcagtctgctgatggtcttctttctcctcgtatatatgaagctttggcagctatttgttcctgtcagcagggccggagctgtatgtgagagtctgtctgcgtcggtcatcggagggctattgtttatttattgtatgataagaatgaagattttcacggacgaagagctgagcggccttcctttcggcagtgctttaagcaaattgaaaaagaggagagaaaaacatggcaggtaacattacggtcgtcggcctcggcgccggagacatggatcagttgacagtgggcgtacataagctgctgactcaggcgaagcatttatatataagaacgaaagaccaccctttgattccggaattagagcaagagacggaagcggtcatccggtattttgatgatatttatgaaaaacatgatcagtttgaagcggtctatgaagagatcgcggacattctgtttgaaaaagcgaagcaagaggatgtcgtctacgctgtgcccgggcatccgtttgtcgctgagaaaaccgttcagctgttatttgaacgccgggaagaacaacaggcagctgttcatactgccggagggcaaagctttttggatgccacttttaatgcattgcgaattgatccgattgaagggtttcaatttacggatgcgcaaacaatgacgccggatgagctcgaactccgccatcacctgatcatttgccaggtttatgaccaaatgacggcctctgaggtgaagctgacgcttatggagaaattgcctgacgactatgaagtggtcatcgtcacggcagccggaagcaagggagaaaagatgaccaaggtgcctttgtttgagcttgaccgcaatgtagaaataaataacttaacaagcgtgtatgttccgccgattaaaaaagaagaactcctttaccaggaattttctgcattccgaagtattattcgcgagcttcgcgggccgaacggctgtccgtgggatcaaaagcagacacaccagtcattaaagaaatatatgattgaggaatgctacgaactgcttgaggccattgacgaagaggacacggatcacatgatagaagaactcggggacgtcatgcttcaggttatgctgcacgcccagatcggagaagacgaggggtatttctcaattgatgatgtcatcagagacatcagtgcgaagatggtcagacggcacccgcacgtgtttaaggatgttaaggttcaggatgaacatgatgtcgtcgccaactgggaagaaatcaaaaaggcggaaaagcaaacaacatcctcttcattgctggatgccgtgccgaaaacactgccttctcttgcgaaagccgccaagcttcagaaaaaagccgcaaaaaccggctttgactgggatgacgttcaggatatatgggataaagtaaatgaagagctgaaggaattttctgcagaggcttccgccgaatcagcagatgaaatcagcttaaaagctgaattcggcgatgttttatttgcattggtcaatatcggccgatactataaaattgagcctgaggaagcgctcgccatgacaaatgacaaattccgcagacgctttgcttatattgagaaagaagcggcggcaaagggacttgaattgaccgcaatgtcacttgaggaaatggacaaattgtgggatgaagcaaaagaaatggagaggagattctgatatgagacttgataagtttttaaaagtatccagattgattaaacgccgcacattggcgaaagaggtcgccgatcaagggagaatcaccgttaacgggaatcaggcgaaagccagctcagacgtaaaagccggtgatgaactgacggtccgcttcggccagaaacttgtcaccgtgaaggtaaacgaattgaaagaaacaacgaaaaaagaagaagccgcgggcatgtatacaatcgtcaaggaagaaaaactcggcgaataggcttgttctaaacaaggctcccgcctcatacaatgcagtaataatgctaaaagtatcgaggatatgggggctgaatagatgaattcatattatgagcaaaaaggttcttcttctgttccggaacagcatgatgtaacgatgaaagggagaaagcatttagacatttcgggcgtcaagcatgtggaaagttttgacaacgaagagtttttgctggaaacggttatgggaatgctttccgtcagaggcgagaacctgcagatgaaaaatcttgatgtggaaaaagggattgtatctataaaaggcagggtgtttgaccttgtatatttagacgagcagcaaggggataaagctaaagggttttttagcaagttgtttaaatgacgctgaccacccaattttatacgatgctggcaatgaccggtatgggcgcctggctcggagcgtcgcttgatacatacaggctgtttgtcagccgcgccaaaacggccagatggctgttattcattcatgacattctcttttggattgtacaaggtctgctgtttttctatgtgctgctcaacgtgaatgaaggagaactcagggtatacattttcttggctgtcttactggggattgcgacgtaccaaagcctgtttaaacgaatgtatataaaaatactgaaatttgccattcatcttgcggtgtctctttaccaattcgcaaaaaagctcattcaacacgtgctgttccgtccggtgcttctgctctttaagctgctcatcgggctgatcacggttgtttctttatactcctatcaggtgagtgccttttttgcgaagtgtctttttaagatcgtaacgtttttgctgtatccgctgtttttcctgttgaaacaattattgaaacttcttcctgaaaagtggcgtcttactttcaaacgatattttcaaaaaagtgcaggatttttacaaaagagcaagaaactaatcataacaatcagatcgaccatgatacgtattttgaaaaggtgaaaggaggaccgtctggtttgaatctatctagagaacgtacaataactgaaatccaaaacgactataaagagcaggttgaacggcaatcccagcttatgaaaagaaggcggaaagggcttttcagacggttgatcgtattcggcgcccttgtgttgttgacggctattgtcttagcgggttctctgtggtcacagacctcttcccttagcgcaaacgaagaaaagaaagctcagctggaaaaacaagtgaaagaattgaacgcgaaacaggctgatttaaaagatgaaatttccaaattaaaggatgaggattacgtcacagagcttgccagaagagacttgtttatgtcaggaaatggtgagatactcttcaatgtagaaaagaagagcaagtagccttgttgacacttaaatttttatttaggtataattaaacaaacgatctttttataagcctaaggaggagcactttttttatgtcgattgaagttggcagcaagttgcaagggaaaataacaggtattacaaatttcggagcatttgttgaattgcctggaggctcaaccggtctcgttcatatcagtgaggtagccgataattatgttaaagacattaacgagcatttaaaagtcggcgatcaagttgaagtgaaagtcatcaacgttgaaaaagacgggaaaattggtttatcaattaaaaaagctaaagaccgtccgcaagccagacctagaaatgatttccgtccgaaagaatcttttgaacagaaaatgaacaagtttcttaaagatagcgaagaccgcttatcatctttaaaacgaaacacggaatcaaaacgtggagggcgcggagcaagaagaggataacttgctgctttctataaatacatggagcatccgtctatcccagcgggtgctttttttgtatgcgccattatagtcagaaaattaaaacttcaaagtttctgttgacggaatgaagaaacctttgtattatataacttgtgcttataagcaccttatatggcggtgtagctcagctggctagagcgtacggttcatacccgtgaggtcgggggttcgatcccctccgccgctaccatatatatctggcccgttggtcaagcggttaagacaccgccctttcacggcggtaacacgggttcgaatcccgtacgggtcatcaagcgaatcggcttctgttgcagaagccggttttttcatatttagacaactttttgagaaatgtcggaggaaatacgaaaggaaaggggaacaagggagaaagcgtcgaagagttctttggaattgttaccttcttttgacaaaatcctatctgggctttcatttataatgacaagcaacgaataaaacaggtgggggatgagagcaatggaaaaagcggaaagaagagtgaacgggccgatggcgggacaagctctggaaaaactgcaatcgttttttgaaaaggcggcaaagcttacagtccatcaagcgcattcactttttttctataagggtttcatttatgtcgtgatcggttttttacttggacgggctttcatattatctgaggttcttccgtttgcgctgccgtttttcggagcgatgcttttgatcagaagagataaagccttctatgcttgtctgtctttacttgcgggcgctttaaccatttcgccgaaacactctttattgattctcacagctttggccgtcttcactctattttcaaaaatcggtacatatatcgtgcaggaccgggtgaagatgctgccgatcgtggtgtttttctctatggctgcggcgagaatcggatttgtttattttgagagcggcgcttttaccacctatgattatgtgatggctgttgtcgaggcgggcctggcctttattttgacgctgatctttttgcaaagcctgccgatcttcacgatcaaaaaagtgaagcaatcgttaaaaatagaagaaatcatctgttttatgatcttgatcgcatccgttttaaccgggcttgccggtgtttcatttcagggaatgcaggctgaacatatcctggcccgctatgtcgtgctgagtttttcctttgtcggcggggcaagcatcggctgtacggtcggtgtggtgaccggactgatcctcgggcttgcgaatatcgggaacctctatcaaatgagtctgcttgcgttttccgggcttcttggcgggctgctgaaagaaggaaagaaagccggagccgcagtcgggttagtgatcggctcactgctgatttcattatatggagaagggtctgccggattaatgaccactctttatgaatctttgattgccgttgttttgtttttgattacgccccaatcgattacgaaaaaggtggcgcgatacataccgggcactgctgagcatagtcaggaacagcagcagtacgcgaggaaaatcagagatgtcaccgcccagaaagtagaccagttctccaatgtgtttcatgccttgtcggagagcttcgccacctttcatcagacgtcttctgatgagcaggcggaagaaggggaagtggatctctttttaagcaaaatcacggagcattcgtgccaatcctgctataagaaaagcaaatgctgggttcaaaactttgataaaacatatgacttaatgaaacaagttatgcatgaaacagaagaaaaacagtatgcttcaaaccgcagattaaaaaaggagtttcaacagcactgttccaaatccagacaggtggaagagctgattgaggacgaacttgcccaccatcacgcccatctgacactgaagagaaaagttcaggacagcagaaggcttgttgccgagcagctgttgggggtttctgaggtcatggcggacttttctcgggaaataaaacgggagagggagcagcattttattcaggaagaacaaatgatagaggcgcttcagcatttcggaatcgagattcagcatgtcgagatatacagcttggagcagggcaatattgatatcgaaatgacaatcccgttcagcggaggacacggcgagagtgagaaaattatcgccccgatgctgtctgacattcttgaggagcagatacttgtcaaaagcgaacagcactcgactcatccgaatggctacagccatgtcgcgttcggttcgaccaagtcgtaccgggtatcgacaggcgcggctcatgcggcaaaaggcggcggccttgtctccggcgacagctacagcatgatggaactgggggcgagaaagtatgcggccgcgatcagtgacggcatgggcaatggggcgagggcccattatgagagcaacgaaacgattaagctgctcgaaaaaattctcgaatcaggtattgatgaaaaaatagcgatcaaaacgatcaacagtattctgtctttacggacgacagacgaaatttactcaactctcgatctttctatcattgatcttcaggatgcaagctgcaaattcttgaaggtcggttcaacgccgagttttatcaagcggggagatcaagtcatgaaagtgcaggccagtaatctgccgatcggcatcatcaatgaatttgatgtggaggttgtaagcgaacagttaaaagcgggagatctgctcgtcatgatgagtgacggtatttttgaaggaccgaagcacgttgaaaaccacgacctgtggatgaaacggaaaatgaaagggctgaaaaccgaagatccgcaggaaatcgctgatatattaatggaagaggtcatcagaacgcgttccggccaaatcgaagacgatatgacggtggttgttgtccggattgaccacaacacgccgaaatgggcttccatacctgtgccggcggttttccaaaataaaaaggagatttcttaatcatttcgtataaatcactttccttctggcgaagatgggactaatcgtatcaccgggaggaatgtatgtgaataagggacatttaaatcaagttctgctgattacagatggctgctccaatcatggtgaagacccgatcgcaatggcggctttcgccaaggagcaggggattacggtgaatgttataggaattatggaagaaaacgcgattgaccaagaggcaatgaaggaagttgaaggcatcgccatggccggaggcggcgtccatcaagttgtgtatgcgtcacaattgtctcagacggttcaaatggtgacgaaaaaagcaatgacccagacgctgcaaggtgtcgtcaatcaagagcttaaacaaatcttagggaaaaacgttgaaatggaagagctttctcctgaaaaacgcggagaagtgatggaagtggttgatgaactcggcgaaacggttcatctgcaagtgcttgtactggttgatacgagtgccagtatggcaccgaaactgccgactgtgaaagaagcgctgatcgatctttccatcagtttaaattcccgggccgggcaaaatgaatttgcaatgtgtatatttcccgggaaaagccaggaagttgagcttgtgctgaattggacgccgaagcttgaatccctttctgcactctttgcgaagctgtcgaccggcggtatcacccctacgggccccgctatccgggaagcgacgcagcagtttgagagaatccgctcaagaaggagcatgttggcagatgatgaacgacgctttaacgagtttggcatgtagtctggcaccggggacggcaattcagggcaaatggaacggcaaatcctacagattgctcaaacagcttggaaaaggggctaacggtattgtatatctggcagaagcatcaggcggacaggtcgctttgaaaataagcagcgacagcatgtctgttacctctgaagtgaatgtcttaaaatccttttcaaaggcccggtcgcaaacgatggggccttctttttttgatgcggacgacgcgtttattccgcagctgaataaaaatgtctctttttacgtgatggagtacatagaagggccgcttcttccgcaatatatcagcagtaagggagcggagtggattccggtgctgatggtgcagcttctttccagcctgtcagtccttcatcagcaagggtgggtttttggcgacctcaaaccggacaatctcattgtaaccggaccaccggctgccattcgctgcattgatgtagggggaacgacaaaacagggccgcgcgattaaagagtatacggagttttacgacaggggttattgggggtatggaacaagaaaagcagaaccatcctatgacctgtttgctgtcgcaatgatcatgatccactgtgtccagaagaaagagtgcaaaaagtcaggacagccgaaagaacagcttcgttctatcattgaaggccacccgtttctgaataagtataagaaggttctgttttctgctttaaacgggcaatatccgtctgcggaagccatgaagcatgacatcctgacggcggggcagagtgccgggagcaaaaggaaagccgccgccaagcctaagccgccgcaatcaaaaccgcggcagggcactgtatctcaaacgcggtataaacctaaacaaaaacccgcaaagcacaatggtttgtttgaaacaacacttattttaatcagcgttctcgccctttatttcgcttacatcgtcttttttctcatctaaagccggccggacgcctgcgctcatgcttcttctttgcttggagggaatgaaagtgataggatatgtatatctttaaaaaacctgctcattgtgagggggacattgtgaaaagcgtggaagattttttcaaaacatatcatcttcaggcggagggagaaacgattattgccggggtctccggaggccctgattcaatggcgcttctcagtatgctgaataagcacttcgggcattcctccgttatcatagcggcgcatgtcgaccatcagttcaggggtcctgaatctgaagaagatatgaagtttgtgcagtcatattgcgaagcggaacatatcctctgcgaaacggtacagattgatgtttctgcatacgcaaagaagaataagctgaacaagcaggctgccgcgcgtgattgcagatatcagtttttcgaagatctgatgacaaaacaccaagcgaagtttttggcgctggctcatcacggcgatgaccaggttgagacaatgctcatgaggcttgcgaaaggtacgctcggggcagggcttgcgggaatgcagcccgtccgcgaatttgcatccggctggctgatcaggcctttcctctatgcggcaaaggatgaaatccttgaatactgccgtcaagaagggctcagctacagaatggatgagagcaatgcaaaagacgattatacaagaaacagattcagaaagaccgtgcttccttttttaaaacatgaatcacctgacgttcataaaatgtttcaaaaggtgagtgaagcactgacagaagacgaacaatacctgcagtcattaacgaaagaacgaatgaataaggttattacaagcaagtctgacacatcggttgaagtcaattcctctcaattgcttgcccttccgatacctttacaaagaagaggagttcaactaatattaaactatctttatgaaaacgttccatcgtcgttttccgcccgccacatacagcagtttctcgaatgggcggaaaatggaagcgcctcgggagtacttgattttccgaaagggctgaaggtggtcaaatcatatcagacatgtttgtttacatttgaacaatggcaatgtgaaaaagttccctttaagctgcagctgcaaggagcggaaggcgagactgctgttctccccaacggctttatgatagaggtggccgatcaggctgaccctcatatcaaaaatgggaatgctgtttttatgacaagcagaaacaaggtgcaatttcctttaacaatccggacgagaaaaatcggcgaccggatcaaacttaaagggatgaatggctcgaaaaaggtgaaagatatatttattgatcataaactgcctctgcgggatcgggacgaatggccgattgtaacggatgcgagcggtgaaattatctggctgcctggcttgaaaaaatccatctttgacgatcttgtgatttcaaacagtgaccgcattgtattacaatatagacagcatgaaaagtgtagggggcaagcattaacatgaaacaggatatcgaaaaagtgctgatctcagaagatgagatccagcagaaagtaaaacagcttggagaacaattaacaagcgagtacagcgacacgtttccgttggcaatcggtgtgttaaagggagcgcttccttttatggctgatcttataaagcatattgatacatatttggaaatggacttcatggatgtatcaagctacggaaattccacggtttcttccggagaagtcaaaatcatcaaagatttggatacatctgtagaaggccgggacatcttaatcattgaagatattatcgacagtgggttaaccttgagctatctcgtagaactcttccgatatcgtaaagcgaaatcaattaagattgttaccctgttggataaaccaagcggaagaaaagcggacattaaagcagacttcgtaggctttgaagttcctgacgcgtttgttgtgggttacggacttgattatgccgaacgctatcgcaatctgccttacatcggagtattaaaaccggcaatttatgaaagctgatcggctgcctgcttccgagatggttatcggttgtattggaatgattttctatggtactattgaacatagttgtgcttactgtgggaggaggtaaggaatgaatcgggtcttccgtaataccattttttatttacttattttattagtagtaatcggggttgtgagttacttccagacttcaaacccgaaaacagaaaatatgtcgtacagtacgtttatcaagaaccttgatgaggggaaggttgatagcgtatcggttcagcctgtcagaggtgtttatgaggtaaaaggacagctgaaaaaatacgacaaagaccagtactttttaacacatgttcctgaaggaaaaggagcagaccagatatttgatgcaattaaaaagacggacgtaaaagttgatcccgcacaggaaacaagcgggtgggtgacgttcttaacgacgatcattccgtttgtcatcatctttattctgtttttcttcctgctcaatcaggctcagggcggcggcagccgtgtcatgaacttcggaaagagcaaagcgaagctgtatacggaagaaaagaaacgcgtgaagtttaaagatgtagccggcgcggatgaggagaagcaggagcttgttgaggttgttgagtttctgaaagatcctcgcaaattcgccgagcttggcgccagaatccctaaaggcgtgctgttggtcggacctccgggaaccggtaagacgctgcttgcgagagcctcagccggtgaagcgggcgttcctttcttcagcatcagcggatctgacttcgttgaaatgtttgtcggtgtcggtgcttcccgtgtgcgtgatttattcgaaaatgcgaaaaagaatgcgccttgtctgatcttcattgatgagatcgacgcggtgggacgtcagcgcggcgcaggtcttggcggcgggcatgatgaacgcgaacagacgctgaaccagctgcttgttgagatggacggtttcagtgcgaatgaaggaatcattattatcgctgcgacaaaccgcgcggacattcttgaccctgcattgctccgtccgggacgttttgaccgtcagattacggtagaccgtccggatgtcatcggccgtgaagccgtattacaggtgcatgcgagaaacaaaccgcttgatgaaacggtgaacttaaaagcaatcgcttcaagaacacccggtttctcaggcgccgatttagaaaaccttcttaacgaagcggcactcgttgctgcccgtcaaaacaagaagaaaattgatatgcgcgacattgatgaagcaacggaccgtgtcattgcgggtcctgcgaagaagagccgcgtcatctcgaaaaaagaacgcaatatcgtggcgtaccacgagggcggtcacaccgttatcggacttgtgctggatgaagccgatatggttcataaagtaacgatcgttccgagggggcaggctggcggatacgcggtcatgcttccgagagaagaccgttacttccagacaaaacctgaacttctcgataaaattgtcggtcttctgggcggacgcgttgccgaggaaattatcttcggcgaagtcagcacgggcgctcacaatgacttccagcgggcaacgaacattgccagaagaatggtgacagagttcggtatgtctgaaaaactcggaccgcttcagttcggtcaatctcaaggcggtcaagtattcctgggccgggatttcaacaacgagcaaaactacagtgatcaaatcgcttacgaaatcgatcaggaaattcagcgcatcattaaagaatgttatgagcgtgcgaaaaccatcctgactgaaaatcgtgataagcttgaattgattgctcagacattgcttgatgtggaaacattagatgcggaacaaatcaagcatctcgtggatcacggaaaactccctgagcgcaatttctcagatgaccatcttcaaaaagacgatgtgaaagtaaacatcctgtctaaaacagaagacgaaaagaaagacgagccgaaagaatagttcgctttctgatatgaaaaccgccggcgtataccggcggtttttttactggttccgttttgtttacaaaagagccgcagatcgtgtatggtattgtagaatgttgaaaatgttatgattagaaactattcaaaagtggtgatagaggttgttactggttatagatgtggggaacaccaacaccgtgattggtgtatatcatgatggggaattagaatatcattggcgcatagaaacgagcaggcacaaaacagaagacgaattcggcatgctgctccgctccttatttgaacattccggactcatgtttgaacagattgaagggattatcatctcatccgtggtgccgccgattatgttctctttagaaagaatgtgcacaaaatactttcacatcgagccgcaagttgtcggcccgggaatgaaaacaggtttaaatataaagtatgacaatccgaaagaagtgggagctgacaggatcgtcaatgccgttgcggcgatccagcagtatggcggccccttaattgttgttgatttcggaacggcgacgacgtattgctacattgatgaaaacaaacaatacatgggcggcgcgattgctcccggcattacaatttcaacggaagcgctgtactcacgtgcggcgaagcttccaagaattgaaattgcccgtccggacaatatcatcggcaaaaacacggtaagcgccatgcagtccggcatccttttcggctatgtcggacaagttgaaggcattgtaaagcggatgaaatggcaggcaacacaggaaccgaaagtcattgcgacaggcgggcttgcgtcattaatcgcaaacgaatcagattgtattgatattgttgacccgtttctcactctgaaagggctggaaatcatttatgagcgaaatcgcgtgggtcacgtataggaggtaaacgatggattatttaattaaagcaattgcatatgacggtaaagtgcgggcttatgcagccagaacgacagatatggttaatgaagcgcaaagaaggcatgacacgtggccgacggcatcagccgcaatcggccggacgatgacagcttctctgatgctaggagcgatgcttaagggtgaagataagctgacagtcaaaatagaaggcggcggcccgatcggagccattgtcgcagatgcgaacgcaaagggtgaggtaagagcatacgtatcaaacccgcacgttcattttgatctcaatgaacaagggaaactggatgtcagacgggcggtcggaactgacggaacactcagtgtcgtaaaagatttgggcttgcgtgattattttacgggacaagtagagattgtctcgggtgaactcggtgacgacttcacatattatcttgtttcttctgaacaagtcccttcatctgtcggcgtaggtgttctggtaaatcctgataacacgattctcgctgcgggcgggttcatcattcagcttcttccggggactgatgaagaaaccatttcaacaattgaaaagcaattatctcaaatcgaaccgatttcaaaattgattcaaaaaggcctgacaccggaagaaatcttagaagaagttctgggtcaaaaaccggacgttctcgaaacaatgccggtcaaatttcactgttcttgttcaaaagatcgattcgaaacggccattttaggactaggcaaaaaagaaatacaagatatgatagaagaagacggaaaagccgaagcggtttgccatttttgtaatgagaaatatttatttacaaaagaagaactggaagagcttcgtgacgaaacaacccgctagctctttagcgggttgttctattttataaaagggatggggtagattttgaaatcgagaacacttttgacgattattgtagcggcgctgttagtatgcagtgtgacagtggcgtataagttaacaaaatcccaagccgcggggtcatctgaagaatccatcgcgacaatcggtgataaacatatcacacggcaagactggatgaaaaagatggaagaccagtacggaaaatcaactctggaagacatgattaatgcagaagtagtggaagagcttgcgaaaaagaataaacttacagtttcaaacagcgaattggagcgggaatttcttttaatcaaagcggtagataattcattttatgaagacagccatattaccgaaaaagaatggagagaccagatccgctacaacattcttcttgaagaactgctgacgaaggacatcgatatatcggataaggaaatgcaatcattttataataaaaataaagaattgtaccatttcgatgattcctacagaatccggcacattgtcgtcaaaaacaaagatgaggcggacagggtgcttgctgatttgaaaggcggttccagctttgaagccgtcgccgctgaacgttccacggacagatatacgtctcagtatggcggagacctcggctttgtgacagaaaaccaggaaaatatcccgcaggcatatatcacagaagctaaaagtcttaaagaagatgaatggtccgctgaaccgattaaagtttcttcaggatacgccgtcattcagctgaaagaaaagcttaaatcgagaactttctcatacaatgaagtgaagagccaaatcagacgccagatcgcgatggatcaattaggtgacaaggcgacagtcaaaacgctgtggaaagaggcgggggtctcttggttctacggggaaaaaagaactaaatgattgacaaaaaattttgaaattgataacttatatttataataccaataaatttagtcggaaattgaggtgtccaacatggtgcgtattgcaaattctattactgaactaatcggaaatactcctattgtgaaattgaatcgcctgacggatgaaaacagtgcagatgtatatctgaagcttgaatacatgaatccgggcagcagcgtaaaagaccggatcggagtggcgatgattgaagcggctgaaaaagaagggaaattaaaagccggcgacacaatcattgaaccgacaagcggaaatacaggaatcggtcttgcgatggtggcagcggctaaaggtctcagagccattctcgttatgcctgatacgatgagtatggagcgacgcaatctgctgcgcgcatacggagcggagcttgtgctgactcccggcgcagaaggaatgaagggcgccattaaaaaggcggaagaacttgccgaggaacacggatactttgtgcctcagcaattcaacaatgcggcaaacccggaaattcaccgccaaacgacagggaaagaaatcgtagaacagtttggtgacgaccagcttgatgcgttcgtggccggaatcggtaccggcggaaccatcacgggagcgggcgaagtgctgaaagaagcatatccatccatcaaaatctatgcggtagagccggcggattctccagttctttccggcggaaaaccgggcccgcataaaattcagggtatcggagcgggatttgtccctgaaacattgaatacggacatctatgatcagatcattcccgtcaaaaacgaggatgcatttgaatatgcccgtaaaacggcaaaagaagaagggattctcggcggcatttcttccggagcggccatttacgcggcactggaaatcgcgaaaaaattggggaaaggcaagaaagtgcttgcgatcatccctagtaacggagaacgttacttaagcacaccgctttatcagtttgaatagagacatacacacggctcccggctgtatccgggagtttttttgtgcctgaagcatcgaaaatccaaaaaacgtttcgaattttatggttggaagtgaaattcacttttttcaccagtgtgattgctttaaaataaaactacagtaaaacgaagcagaggattgatatgatggcacaacgcagaccggcaggaaggaaaataccttttacgaaacaagcatttttacagcgatatgaaaacctttcgaaatcgagaaaacggcatgttctgctcgaaagcgcgagagggggaagattcagtatagccggtctagatccgattgcgtccgtcagagggaaagacggaattacaacgatcaagcatgagggggaaacactgtttaaagaaggtgacccgctgcgggcctttcatgaatggtttggaacgctcggaacggaaacaaacgttgagtttccggactttcagggcggtgcgattggttttatcagttacgactacgcccgatatattgagaattttaagatgctgtcgttagatgatctggaaacacctgatatttactttcttgtttttgatgatgtggccgtttatgaccatgaggaagaggcgttatggctcattacccatactgaagcggaagaagcggatcttgcggaagaaaagctgtcccgcttagaggacatgtggtgttccctccaaacggcggacgagcctttttcaccgctgaatcggaatggggacggatcgtacgccgctccgttcaccgaggaaggattttcacaggctgtagaacaaattaaacaatatatcgcgagcggcgatgtgttccaggttaatttgtccatcaggcagtctcagtctttatccgttcatccgtatgaggtgtataaacacttgagaaacgtcaatccgtctccttacatggcctatctcgagacaccggggtttcaagtgatatgcgggtcgccggagctattggtgacaaagaaggggaagaagcttgaaacgagaccgatcgcgggtacgcgttcaagaggaaaagacgatgctgaagacaaggctttggctgatgaattaattcacaacgaaaaagaacgtgcggaacatgtcatgcttgttgatcttgagcgcaatgacctcgggcgcgtatcgcgctacggctccgtgcgggttaacgaatttatggcaatcgaaaagtattcccacgtcatgcatatcgtgtcaaacgtacagggggaactgcaggacggatatgacgcgacagacattattcatgcggttttcccggggggcaccatcacgggagcgcccaaagtgagaacgatggaaattatagaagagcttgagccgacaagacgggggctttatactggatctataggctggttcggatttaacggagatttgcagtttaacattgtgatccggacgatctatgcagccggcggacatgctttcatgcagtccggagcaggagtggtcattgattcggttccgaagcatgaatacaaggaatcgttcaaaaaagcttttgcaatgaaaaaggcgttagagctgagcgaagaagagacaaaaaattagacgaggtgagcagagatgattttaatgattgacaattatgattcatttacgtacaacttggttcaatatttgggtgagctcggggaggaactgatcgtcagacggaatgacgagattacaattgagcaaattgaagagctggcaccggatttcttaatgatttcacctgggccgtgcagtcctgatgaagcggggatcagcctcgaagcgatcaaacattttgccggcagtgttcctattttcggcgtatgtctcggacatcagtcgattgcgcaagtattcggcggcgacgtcgtcagagcggagcggctcatgcacggcaaaacgtcagaagttatgcatgacggacagacgatttttaaaggcctgcaaaatccgcttgtcgccacccggtaccattcacttattgtcaaagcggacacgctgccggattgttttacggtatccgctcaaaccaaagaaggagaaattatggcaatccgccataatgagctgcctgttgaaggtgttcagttccatccggaatccatcatgacctccttcggcaaagagatgctcagaaactttatagagacacaccgcaaaaaggaagtgacggtgtgattatatatttgaatggtcaatatatagaggagaaagaagcggcgctttctccttttgaccatggttatctgtacgggatcggcgcgttcgagacgttcaggctttacagcggccggccgtttctgccggatgcgcatgtcgccaggctcaacagggcgcttcgggatctgcagattgcatatgaggtgaacaaacaggagctgcttgatatgcttcggagactgttgctcctcaatgagatcaaggacggcagcgcacgtgtccggcttaacatctcggcaggcgtcagcgataagggatttgccgcgcagacttatgaaaagccgaccgtcctttgtttcgtcaaccggctcaatccggaaactctgcctgttcaaaaagaaggcaggcttctctctatcaggagaaatacgcctgaaggatatttccggttaaaatcccatcactatttaaacaacatgtatgctaaacgggagatcgggaatgatcccaattttgaaggcattttcctgaccggagaaggagatgtcgcggaaggcattgtctccaacgtgttttggcgaaaaggagacaaggtctttacgccatccttggatacgggaattctcgatggtgtaacgagacagtttgtcattgatgaattgaaacggcaggggacagaagtcaccgaaggccgattccgttttcaatcaatgcttgaagcggatgaagcatggttgacaaactccgtgcttgaaatcatcccgttttctaaaatagaggaagtgccgctgcccggagtgagcggaaaaacggtgcaattgctccgtaatcagtatcagcaggaaataaacaaaatgaatgtacaggaggaggaacaaaatggcgcagcaaacaattgaacagcctaaactgattcatacaaaaaaaggcgctctttcctataaagagaagacgctcgttatggggatattaaatgtaacgccagactccttctctgacggcggtaaatacgacagtacggaaagggcgcttctgcatgcggcgaagatggctgaagaaggggcgcatatcatagatatcggcggcgaatcgacaagacccggcgcatcactcgtgtcggctgatgaggaaatgtcacgagtcatccccgtcatagagcggatcacaagcgagctggacattccgctttcaatcgatacgtacaaagcgtccgtggcagacgaagcggtcaaagcgggagcctctatccttaatgacatctggggggcgaaaggtgatcctgacatggcgtcagtagccgccgcacacggggttccgattatcttaatgcataaccgcatggaaagaaactacaacgatcttattcctgatatgcttgcagacttgatggaaagcgtaaaaattgccgcggaagccggcgtcacagatgaaaatatgattctggatccggggatcggctttgcgaaaaactatgaggacaatctggctgtcatgaacaagctggaggtgttcagcgggttaggttatccgctgcttctggcgacatcgagaaaaaggttcatcggccgtgtgcttgaccttccccctgaagaacgtgccgagggaacgggagcgacagtatgccttggcgtccaaaaaggctgcgacattgtgagggtgcacgatgtcaaagagatcgcaagaatgacgaagatgatggatgctatgttgaacaaaggaggcgtacattatggataaagtatatgtggaaggtatggagttttacggatatcacggcgtgttcgaagaagaaaacaaactcggccagcgcttcaaagtagacctgactgccgaactggatttgagcaaagcgggaaaaacggatgacctctcttataccattaactatgcggaattgtacagtgtctgccgcgacatcgttgagggcgagcccgttaatttggtcgagacccttgcggaacggatcgcagacaccgtccttgagaaatttgagctggtgcagcaatgtacggtaaaggttgttaagcctgacccgccgattcccggccattataaatcagtagccatagaaatgacgagaaagaaatcatgaacaatacggcatatatcggcctcggttccaatatgggcgaccgtgaacattatttgcgtcaggcagtggccatgctcagccggcatcatggcgtgacggtgtcaaaggtgtcctccatatatgaaacagatcccgtcggctatgaggatcaagatcagtttctcaatatggcggttgaagtgaaaacgtcgttatctccttttgaacttcttgatgtaacgcagagcattgaagctgaattaggcagaacgagagagattcgctggggaccgcggacggcagaccttgacattttgctgtataatcgtgaaaatattgaaacagagcggctgattgttccgcatccgagaatgtatgagcgcttatttgtccttgcgccgttaaaagaaatatgcccgcaggcggatcatatcacgataagcgctgaaacaaaccaagaaggtgtaagagtatggaagcagaaatctggggtaggcgaattcgtgcattcagaaagctgaaaggttatactcaagaaggatttgcaaaagcattaggtatatcagtttctattgtcggtgaaattgaacgcggaaaccgattgccgtcagatgccatcattcaagatgcggcagatgttttaaatataagtgcggacgaattggccccgcctgaaaaatagacaaatgaaaggaggggaaaaatgtttaaaatcggtgatattcaattgaaaaaccgggttgtgcttgcccctatggccggtgtctgcaactcagcgttcagattgactgtaaaggaattcggagccggattggtatgcgctgaaatggtcagtgacaaagcgattctttacaacaacgcaagaacaatggggatgctttacattgatgaacgtgaaaaaccgctcagccttcagatttttggagggaaaaaggaaacccttgtggaagcggcgaagtttgtagatcaaaacacgactgctgatattattgatattaacatgggatgtcccgtacccaagattacaaaatgtgatgcgggcgccaaatggctcctcgatcctgataagatttatgaaatggtatccgcagtagtagatgctgttgataagccggttacagtgaagatgagaatgggttgggatgaagagcacatttatgcggtgaaaaatgcccaagccgttgaacgtgccggcggaaaagccgttgccctgcacggccgcacaagagtgcaaatgtatgaaggcactgcgaactgggatatcattaaagaagtgaagcaatccgtctccattcccgtcatcggaaacggtgatgtcaaaacgcctcaggacgcgaaacgcatgcttgaggaaacaggagttgacggcgtcatgatcggccgggccgcactcggcaacccgtggatgatttaccgtacggtgcactaccttgaaaccggtgagttaaaagacgaaccgaaagtccgtgaaaaaatgtcggtatgcaaactgcacttagaccgcctgattaagttaaaaggcgaaaatgtggcagtcagagaaatgagaaaacacgctgcctggtatctgaaaggtgtcagaggcaatgcgaatgtacgcaacgaaattaaccaatgtgagacgcgtgaagaagttgtgcagcttttagatgcatttaccgccgaagcagaggcaaaagagcttcaagatgcaaaagtaggttaatatacaccctctattgctgctcactgccagcttaccgctggcagtttttctgctttttcgtgaaatcaaaatgtaacggagtgataccaatgagtcaagaagagcaaaatcatgaggaattgaacgaccagctgcaagtcagacgagataaaatgaaccagctgagagaaaacggcattgaccctttcggcgaacgtttcgagagaacgcatcaatctcaacagatcattgacgcctaccaggagctttctaaagaagaactggaagaaaaagcggtcgaagtgaccattgcaggccgtatgatgacaaagcgcggaaaagggaaagccggctttgcgcatctgcaggacttagaaggtcaaattcaaatttacgtaagaaaagacagtgtcggcgaagaacaatatgaaatctttaaatcttcagacctcggagacgttatcggcatcacggggaaagttttcaaaacaaacgtaggcgagctttctgtcaaagcgacatctttcgaactgctgacaaaagcactgcgtcctcttcctgataaatatcatgggttaaaagacgttgaacagcgttaccgccagcgctatctcgatctcatcgtaaaccctgacagcaaacaaacgtttatcacacgcagcaaaatcatccaagcgatgagaagatacttagatgaccatggatacttagaagttgaaacacctacgatgcacagcataccgggaggagcgtctgcgcgcccgttcatcacgcaccataatgcgctcgacatgcctctttatatgcgtattgcgattgaactgcacctgaaacgcctgattgtcggcggattggaaaaagtctacgaaatcggtcgcgtgttccgtaatgaaggtgtttctacacgccataaccctgaattcacgatgatcgagctgtatgaagcgtacgccgattataaagatattatgagtcttacggaaaacctcgtagcacatattgcgcaggaagtgcttggaagcaccacaatccagtacggcgaagagcagattgatttgaaacctgagtggaaacgactccacatggtagatgcggtcaaagaagcgacaggtgtagatttctggaatgagatgactgttgaagaagcgcgcggtcatgcaaaagagcatggtgtcgagatcacaaactcaatgacggtgggtcatatcatcaatgaattcttcgaacaaaaaattgaagaaacactcattcagcctacatttatttacggccaccctgtagagatttctcctcttgctaagaaaaatccggaggactctcgctttacagaccgttttgaactgtttatcgtcggccgtgagcacgctaatgcgtttacggagctgaatgaccctattgaccagagggaacgctttgaagcgcagttaaaagaaagagaagaaggaaacgatgaagcgcatatgatggatgaagacttcgttgaagctcttgaatacggcatgccgccgaccgggggattgggtatcggtatcgaccgccttgtcatgctgttaacaaatgctccgtctatcagagacgttttattattccctcaaatgagacaacgctaataaaagggaaggcgccgtttctgcttatcgcagtacggcgcttttttagaaacaagccgctcgtaaaacttttttgattttcttttaaaaaactattgcactattatttgtgaggtggtatattattattcgttgccgctaaacaaggcgctgacgaaaaaagaaatttaaaaagttgttgacttcaagagattgataagatataataataaagtcgcttgaacgaaagacaaaatgatctttgaaaactaaacaagacaaaacgtacctgttaattcaaagttttaaataaatcgcacagcgatgtgcgtagtcagtcaaactactttatcggagagtttgatcctggctcaggacgaacgctggcggcgtgcctaatacatgcaagtcgagcggacagatgggagcttgctccctgatgttagcggcggacgggtgagtaacacgtgggtaacctgcctgtaagactgggataactccgggaaaccggggctaataccggatggttgtctgaaccgcatggttcagacataaaaggtggcttcggctaccacttacagatggacccgcggcgcattagctagttggtgaggtaacggctcaccaaggcgacgatgcgtagccgacctgagagggtgatcggccacactgggactgagacacggcccagactcctacgggaggcagcagtagggaatcttccgcaatggacgaaagtctgacggagcaacgccgcgtgagtgatgaaggttttcggatcgtaaagctctgttgttagggaagaacaagtgccgttcaaatagggcggcaccttgacggtacctaaccagaaagccacggctaactacgtgccagcagccgcggtaatacgtaggtggcaagcgttgtccggaattattgggcgtaaagggctcgcaggcggtttcttaagtctgatgtgaaagcccccggctcaaccggggagggtcattggaaactggggaacttgagtgcagaagaggagagtggaattccacgtgtagcggtgaaatgcgtagagatgtggaggaacaccagtggcgaaggcgactctctggtctgtaactgacgctgaggagcgaaagcgtggggagcgaacaggattagataccctggtagtccacgccgtaaacgatgagtgctaagtgttagggggtttccgccccttagtgctgcagctaacgcattaagcactccgcctggggagtacggtcgcaagactgaaactcaaaggaattgacgggggcccgcacaagcggtggagcatgtggtttaattcgaagcaacgcgaagaaccttaccaggtcttgacatcctctgacaatcctagagataggacgtccccttcgggggcagagtgacaggtggtgcatggttgtcgtcagctcgtgtcgtgagatgttgggttaagtcccgcaacgagcgcaacccttgatcttagttgccagcattcagttgggcactctaaggtgactgccggtgacaaaccggaggaaggtggggatgacgtcaaatcatcatgccccttatgacctgggctacacacgtgctacaatggacagaacaaagggcagcgaaaccgcgaggttaagccaatcccacaaatctgttctcagttcggatcgcagtctgcaactcgactgcgtgaagctggaatcgctagtaatcgcggatcagcatgccgcggtgaatacgttcccgggccttgtacacaccgcccgtcacaccacgagagtttgtaacacccgaagtcggtgaggtaacctttatggagccagccgccgaaggtgggacagatgattggggtgaagtcgtaacaaggtagccgtatcggaaggtgcggctggatcacctcctttctaaggattttaacggaatataagaccttgggtcttataaacagaacgttccctgtcttgtttagttttgaaggatcattcgattcttcgagatgttgttctttgaaaactagataacagaagtaattcacattcaattagtaatgcaagatatcacgtagtgattctttttaacggttaagttagaaagggcgcacggtggatgccttggcactaggagccgatgaaggacgggacgaacaccgatatgcttcggggagctgtaagcaagctttgatccggagatttccgaatggggaaacccaccactcgtaatggagtggtatccatatctgaatacataggatatgagaaggcagacccggggaactgaaacatctaagtacccggaggaagagaaagcaaatgcgattccctgagtagcggcgagcgaaacgggaccagcccaaaccaagaggcttgcctcttggggttgtaggacactctgtacggagttacaaaggaacgaggtagatgaagaggtctggaaaggcccgccataggaggtaacagccctgtagtcaaaacttcgttctctcctgagtggatcctgagtacggcggaacacgtgaaattccgtcggaatccgggaggaccatctcccaaggctaaatactccctagtgaccgatagtgaaccagtaccgtgagggaaaggtgaaaagcaccccggaaggggagtgaaagagatcctgaaaccgtgtgcctacaagtagtcagagcccgttaacgggtgatggcgtgccttttgtagaatgaaccggcgagttacgatcccgtgcaaggttaagcagaagatgcggagccgcagcgaaagcgagtctgaatagggcgaattgagtacgtggtcgtagacccgaaaccaggtgatctacccatgtccagggtgaagttcaggtaacactgaatggaggcccgaacccacgcacgttgaaaagtgcggggatgaggtgtgggtaggggtgaaatgccaatcgaacctggagatagctggttctctccgaaatagctttagggctagcctcaaggtaagagtctcggaggtagagcactgattggactaggggcccctaccgggttaccgaattcagtcaaactccgaatgccgatgacttatccttgggagtcagactgcgagtgataagatccgtagtcgaaagggaaacagcccagaccgccagctaaggtcccaaagtatacgttaagtggaaaaggatgtggagttgcttagacaaccaggatgttggcttagaagcagccaccatttaaagagtgcgtaatagctcactggtcgagtgactctgcgccgaaaatgtaccggggctaaacgtatcaccgaagctgcggactgttcttcgaacagtggtaggagagcgttctaagggctgtgaagcaagaccggaaggacttgtggagcgcttagaagtgagaatgccggtatgagtagcgaaagaggggtgagaatcccctccaccgaatgcctaaggtttcctgaggaaggctcgtccgctcagggttagtcgggacctaagccgaggccgaaaggcgtaggcgatggataacaggttgatattcctgtaccacctcctcaccatttgagcaatggggggacgcaggaggatagggtaagcgcggtattggatatccgcgtccaagcagttaggctgggaaataggcaaatccgtttcccgtgaaggctgagctgtgatggcgagcgaattatagtagcgaagttcctgattccacactgccaagaaaagcctctagcgaggtgagaggtgcccgtaccgcaaaccgacacaggtaggcgaggagagaatcctaaggtgatcgagagaactctcgttaaggaactcggcaaaatgaccccgtaacttcgggagaaggggtgctctgttagggtgcaagcccgagagagccgcagtgaataggcccaggcgactgtttagcaaaaacacaggtctctgcgaagccgtaaggcgaagtataggggctgacgcctgcccggtgctggaaggttaagaggagcgcttagcgtaagcgaaggtgcgaattgaagccccagtaaacggcggccgtaactataacggtcctaaggtagcgaaattccttgtcgggtaagttccgacccgcacgaaaggcgcaacgatctgggcactgtctcaacgagagactcggtgaaattatagtacctgtgaagatgcaggttacccgcgacaggacggaaagaccccgtggagctttactgcagcctgatattgaatgttggtacagcttgtacaggataggtaggagccttggaaaccggagcgccagcttcggtggaggcatcggtgggatactaccctggctgtattgaccttctaacccgccgcccttatcgggcggggagacagtgtcaggtgggcagtttgactggggcggtcgcctcctaaaaggtaacggaggcgcccaaaggttccctcagaatggttggaaatcattcgcagagtgtaaaggcacaagggagcttgactgcgagacctacaagtcgagcagggacgaaagtcgggcttagtgatccggtggttccgcatggaagggccatcgctcaacggataaaagctaccccggggataacaggcttatctcccccaagagtccacatcgacggggaggtttggcacctcgatgtcggctcatcgcatcctggggctgtagtcggtcccaagggttgggctgttcgcccattaaagcggtacgcgagctgggttcagaacgtcgtgagacagttcggtccctatccgtcgcgggcgcaggaaatttgagaggagctgtccttagtacgagaggaccgggatggacgcaccgctggtgtaccagttgttctgccaagggcatcgctgggtagctatgtgcggacgggataagtgctgaaagcatctaagcatgaagcccccctcaagatgagatttcccattccgcaaggaagtaagatccctgaaagatgatcaggttgataggtctgaggtggaagtgtggcgacacatggagctgacagatactaatcgatcgaggacttaaccaatttgaatgtatgcttactgttatctagttttgagagaacactctcaatggtttggtggcgatagcgaagaggtcacacccgttcccatgccgaacacggaagttaagctcttcagcgccgatggtagtcgggggtttccccctgtgagagtaggacgccgccaagctattacatgtaagtgtaatatatggaggattagctcagctgggagagcatctgccttacaagcagagggtcggcggttcgagcccgtcatcctccaccatatttgccggcctagctcaattggtagagcaactgacttgtaatcagtaggttgggggttcaagtcctctggccggcaccatttttggacaagataataacataagtcttttaaaaagagccattagctcagttggtagagcatctgacttttaatcagagggtcgaaggttcgagtccttcatggctcaccatgttacgcgggtgtggcggaattggcagacgcgctagacttaggatctagtgtcttatgacgtgggggttcaagtcccttcacccgcattatacaggatagttatcctgtatgcggaagtagttcagtggtagaacaccaccttgccaaggtgggggtcgcgggttcgaatcccgtcttccgctccaactataccatccacgccggggtggtggaattggcagacacacaggacttaaaatcctgcggtaggtgactaccgtgccggttcaagtccggccctcggcattcattgttatgcgcccgtagctcaattggatagagcgtttgactacggatcaaaaggttaggggttcgactcctctcgggcgcgccataatatttttaaaaatcgggaagtagctcagcttggtagagcacatggtttgggaccatggggtcgcaggttcgaatcctgtcttcccgaccacttcggggccttagctcagctgggagagcgcctgctttgcacgcaggaggtcagcggttcgatcccgctaggctccaccatttataaaaaaacatgttgactttaagagaaacttattatatacttaaaaagttgcttgagaaagtgaacaaaatgatctttgaaaactaaacaagacaaaacgtacctgttaattcaaagttttaaataaatcgcacagcgatgtgcgtagtcagtcaaactactttatcggagagtttgatcctggctcaggacgaacgctggcggcgtgcctaatacatgcaagtcgagcggacagatgggagcttgctccctgatgttagcggcggacgggtgagtaacacgtgggtaacctgcctgtaagactgggataactccgggaaaccggggctaataccggatggttgtctgaaccgcatggttcagacataaaaggtggcttcggctaccacttacagatggacccgcggcgcattagctagttggtgaggtaacggctcaccaaggcgacgatgcgtagccgacctgagagggtgatcggccacactgggactgagacacggcccagactcctacgggaggcagcagtagggaatcttccgcaatggacgaaagtctgacggagcaacgccgcgtgagtgatgaaggttttcggatcgtaaagctctgttgttagggaagaacaagtgccgttcaaatagggcggcaccttgacggtacctaaccagaaagccacggctaactacgtgccagcagccgcggtaatacgtaggtggcaagcgttgtccggaattattgggcgtaaagggctcgcaggcggtttcttaagtctgatgtgaaagcccccggctcaaccggggagggtcattggaaactggggaacttgagtgcagaagaggagagtggaattccacgtgtagcggtgaaatgcgtagagatgtggaggaacaccagtggcgaaggcgactctctggtctgtaactgacgctgaggagcgaaagcgtggggagcgaacaggattagataccctggtagtccacgccgtaaacgatgagtgctaagtgttagggggtttccgccccttagtgctgcagctaacgcattaagcactccgcctggggagtacggtcgcaagactgaaactcaaaggaattgacgggggcccgcacaagcggtggagcatgtggtttaattcgaagcaacgcgaagaaccttaccaggtcttgacatcctctgacaatcctagagataggacgtccccttcgggggcagagtgacaggtggtgcatggttgtcgtcagctcgtgtcgtgagatgttgggttaagtcccgcaacgagcgcaacccttgatcttagttgccagcattcagttgggcactctaaggtgactgccggtgacaaaccggaggaaggtggggatgacgtcaaatcatcatgccccttatgacctgggctacacacgtgctacaatggacagaacaaagggcagcgaaaccgcgaggttaagccaatcccacaaatctgttctcagttcggatcgcagtctgcaactcgactgcgtgaagctggaatcgctagtaatcgcggatcagcatgccgcggtgaatacgttcccgggccttgtacacaccgcccgtcacaccacgagagtttgtaacacccgaagtcggtgaggtaacctttatggagccagccgccgaaggtgggacagatgattggggtgaagtcgtaacaaggtagccgtatcggaaggtgcggctggatcacctcctttctaaggattttaacggaatataagaccttgggtcttataaacagaacgttccctgtcttgtttagttttgaaggatcattcgattcttcgagatgttgttctttgaaaactagataacagaagtaattcacattcaattagtaatgcaagatatcacgtagtgattctttttaacggttaagttagaaagggcgcacggtggatgccttggcactaggagccgatgaaggacgggacgaacaccgatatgcttcggggagctgtaagcaagctttgatccggagatttccgaatggggaaacccaccactcgtaatggagtggtatccatatctgaatacataggatatgagaaggcagacccggggaactgaaacatctaagtacccggaggaagagaaagcaaatgcgattccctgagtagcggcgagcgaaacgggaccagcccaaaccaagaggcttgcctcttggggttgtaggacactctgtacggagttacaaaggaacgaggtagatgaagaggtctggaaaggcccgccataggaggtaacagccctgtagtcaaaacttcgttctctcctgagtggatcctgagtacggcggaacacgtgaaattccgtcggaatccgggaggaccatctcccaaggctaaatactccctagtgaccgatagtgaaccagtaccgtgagggaaaggtgaaaagcaccccggaaggggagtgaaagagatcctgaaaccgtgtgcctacaagtagtcagagcccgttaacgggtgatggcgtgccttttgtagaatgaaccggcgagttacgatcccgtgcaaggttaagcagaagatgcggagccgcagcgaaagcgagtctgaatagggcgaattgagtacgtggtcgtagacccgaaaccaggtgatctacccatgtccagggtgaagttcaggtaacactgaatggaggcccgaacccacgcacgttgaaaagtgcggggatgaggtgtgggtaggggtgaaatgccaatcgaacctggagatagctggttctctccgaaatagctttagggctagcctcaaggtaagagtctcggaggtagagcactgattggactaggggcccctaccgggttaccgaattcagtcaaactccgaatgccgatgacttatccttgggagtcagactgcgagtgataagatccgtagtcgaaagggaaacagcccagaccgccagctaaggtcccaaagtatacgttaagtggaaaaggatgtggagttgcttagacaaccaggatgttggcttagaagcagccaccatttaaagagtgcgtaatagctcactggtcgagtgactctgcgccgaaaatgtaccggggctaaacgtatcaccgaagctgcggactgttcttcgaacagtggtaggagagcgttctaagggctgtgaagcaagaccggaaggacttgtggagcgcttagaagtgagaatgccggtatgagtagcgaaagaggggtgagaatcccctccaccgaatgcctaaggtttcctgaggaaggctcgtccgctcagggttagtcgggacctaagccgaggccgaaaggcgtaggcgatggataacaggttgatattcctgtaccacctcctcaccatttgagcaatggggggacgcaggaggatagggtaagcgcggtattggatatccgcgtccaagcagttaggctgggaaataggcaaatccgtttcccgtgaaggctgagctgtgatggcgagcgaattatagtagcgaagttcctgattccacactgccaagaaaagcctctagcgaggtgagaggtgcccgtaccgcaaaccgacacaggtaggcgaggagagaatcctaaggtgatcgagagaactctcgttaaggaactcggcaaaatgaccccgtaacttcgggagaaggggtgctctgttagggtgcaagcccgagagagccgcagtgaataggcccaggcgactgtttagcaaaaacacaggtctctgcgaagccgtaaggcgaagtataggggctgacgcctgcccggtgctggaaggttaagaggagcgcttagcgtaagcgaaggtgcgaattgaagccccagtaaacggcggccgtaactataacggtcctaaggtagcgaaattccttgtcgggtaagttccgacccgcacgaaaggcgcaacgatctgggcactgtctcaacgagagactcggtgaaattatagtacctgtgaagatgcaggttacccgcgacaggacggaaagaccccgtggagctttactgcagcctgatattgaatgttggtacagcttgtacaggataggtaggagccttggaaaccggagcgccagcttcggtggaggcatcggtgggatactaccctggctgtattgaccttctaacccgccgcccttatcgggcggggagacagtgtcaggtgggcagtttgactggggcggtcgcctcctaaaaggtaacggaggcgcccaaaggttccctcagaatggttggaaatcattcgcagagtgtaaaggcacaagggagcttgactgcgagacctacaagtcgagcagggacgaaagtcgggcttagtgatccggtggttccgcatggaagggccatcgctcaacggataaaagctaccccggggataacaggcttatctcccccaagagtccacatcgacggggaggtttggcacctcgatgtcggctcatcgcatcctggggctgtagtcggtcccaagggttgggctgttcgcccattaaagcggtacgcgagctgggttcagaacgtcgtgagacagttcggtccctatccgtcgcgggcgcaggaaatttgagaggagctgtccttagtacgagaggaccgggatggacgcaccgctggtgtaccagttgttctgccaagggcatcgctgggtagctatgtgcggacgggataagtgctgaaagcatctaagcatgaagcccccctcaagatgagatttcccattccgcaaggaagtaagatccctgaaagatgatcaggttgataggtctgaggtggaagtgtggcgacacatggagctgacagatactaatcgatcgaggacttaaccaatttgaatgtatgcttactgttatctagttttgagagaacactctcaatggtttggtggcgatagcgaagaggtcacacccgttcccatgccgaacacggaagttaagctcttcagcgccgatggtagtcgggggtttccccctgtgagagtaggacgccgccaagctatcattacggtaaaggcagctcatcatgagctgccttttttgtgtttttctgcatacgttatataatatgagaaacgtaacgatatgcctttttgcaaaagcaggttttatgcttgtgcaaagtggaaataatagagatagagcgatacagttgaaaaattttgcgaaacaccttatagtaaggttaaagtcaaatatagtcaaagtcaatgaaggagggggttgagtgggacataatatttctgacatcattgaacagtacttgaaacaagtattagatcaaaatggcaaagaaattttagagatcaaacgcagtgaaatcgctgataaatttcaatgtgttccttcccaaataaattatgtcatcaacaccagatttacaagtgaaagaggatatattgttgaaagtaaacggggaggcggcggttatattcgtattatcaaaattaaaatgaataacgaagtcgtcctcatcaacaatattatttcgcagattcatacccacttgtcccaagcagcctctgatgacattattctcagactgttagaggacggagttatttcgaaaagagaagctaaaatgatggtgagtgtaatggatcgttcagttctatatattgatttgcccgaacgggatgaactaagagccagaatgatgaaagcaatgctcacatctttaaaactaaagtaagcgggtgaaaagattgatttgtcaagaatgcaatgagagaccggccacttttcactttacgaaagttgttaatggggaaaaacaagaagttcatatttgtgaacaatgtgcaaaagaaaatagcgattcatacagtataagtggaaaccaagggttctcgattcataatttattatcagggctgctgaatatggagtcctcatttcaaaacaccggctctcaaatgttcggctattcagagcaagggacagcttgtaagaaatgcggtatgacgtttcagcagctgagaaaaacagggcgtttcggctgtgcggaatgttacgatacgttctacagccaaattacgccgatcttgcgaaaagttcacagcgggaatacggtgcatgctgggaaaattccaaaacgaataggcggaaacctgcatgtaagacggcaaatggaaatgttaaaaaaagaacttgaatctttaatacaccacgaagagtttgaaagagcagcggaggtcagagatcagatccgatcgttagagcagaagttaaaaagtaaagacagtgagggggaacaagggtaatgtcgctcaagcattttattcaggacgcactaagcaattggatgaagcaaaagggacctgaaagtgacattgtactcagcagccgtatacggttggcccgaaactttgaaaatataaagtttcctgccaggtatacgaatgaagaagcctcatccatcattcagcaatttgaagatcatttttcaggaaaagaactgcctgatatcggtcaatttcatttaatcagaatgagtgaagctcagcctttggaaaaacgggtgctgatggagaaacatctgatcagcccgaatttaacggaatccccttttggcggctgtctgctttctgaaaatgaagaagtcagcattatgttaaatgaagaagatcatatcagaattcaatgcctcttccccggcttccagcttctcaacgctataaaagcggcgaaccaggttgatgactggattgaggagaaagtggattacgcctttggagagaagagagggtacttaacaagctgtcctacaaatgtagggacgggactaagggcttcagtcatgatgcatttgccgggtcttgtattaactaggcaaatgaatcgaattataccggcaattaaccaattaggtttagttgttagaggaatttacggtgaaggcagcgaagcattaggaaatatctttcaaatttcaaatcaaatcacactcggaaaatcagaacaggacattgtagatgatttaaacagtgtggctgcccagctgattgagcaggaacgttcagcccgagaagcgctttaccaaacctcgaaaattgaattggaggaccgggtattcagatcatacggcgttttatccaattgccgtatgattgaatcgaaggaaacggcgaaatgcctttctgacgttcggctggggatagacctggggatcattaaagggctatcaagcaatatacttaatgaactgatgattttgacacagccgggttttctccagcaatattcgggcggtgcattacggccgaacgaaagagacgcgagaagagcggcgcttatcagggaaaggctgcatttagaaatgagtgcaaatagacaggaggatgattcgatatgatgtttggaaggtttacagagcgagctcaaaaggtattggcactggcacaggaagaagcactgcgcttaggccataacaatattggaactgaacatatcttattaggtctggttcgtgaaggagaagggattgcggctaaagcactccaagcactcggactcggttcggataaaattcagaaagaagtggagagcttaatcggacggggacaggaaatgtctcaaacgattcattatacgccaagagcaaaaaaagtcattgagctcagcatggatgaagccagaaagctaggacattcttatgtgggaacagaacacatacttctcggactgattcgtgaaggagaaggcgtagcggcgagggttctgaataatctcggtgtcagcttgaataaggcgagacagcaagtgctgcagcttctgggaagcaatgagacgggatcttctgcatccggtacgaacagcaatgcaaacacgccgacgctggacagtctggcgcgtgatttaactgcgattgcgaaggaagacagtcttgatccggttatcggccgaagcaaagaaattcagcgtgttattgaggtattaagccgcagaacgaagaataaccccgttcttatcggagaaccgggtgtaggtaaaactgcgattgctgaaggcctcgcacagcagatcatcaataatgaagtgccggaaattttacgtgataaacgcgtaatgacattagacatgggtacggttgtagccggtacgaaataccgcggagaatttgaagaccgcttgaaaaaagtaatggatgaaatacgtcaggccggcaatattattttattcattgacgaactgcatacactgatcggagcggggggagcagaaggtgcgattgacgcgtcgaatatcttaaaaccttcactggcccgcggagagcttcaatgcatcggtgcgacaacgcttgatgaataccgtaaatatatcgaaaaagacgccgctctcgagcgccgtttccagccgattcaggtggatcagccctcagccgatgaaagcattcaaattttaaaagggcttcgtgaccgctatgaagcgcatcaccgcgtatccattaccgatgaagcgattgaagcggcggtaaaattgtccgaccgttatatttctgaccgcttccttccggataaagcgatcgatttaattgatgaagcgggttcaaaagtgcgtctccgttctttcacaacgcctccgaacttaaaagagcttgagcagaaactcgatgaagttcgcaaggaaaaagacgctgccgttcagagccaggagtttgaaaaagcggcttcccttcgtgatacggagcagcgcctgagagaacaggtggaagacacgaaaaaaacgtggaaagaaaaacaaggccaggagaactccgaagtttctgtagaggatattgcgatggttgtatccagctggaccggggtgcctgtatctaaaattgcccaaacggaaacagataagcttctcaatatggaaaacattctgcactcccgcgtcatcggccaggatgaagctgttgtagccgttgcaaaggccgtcagacgtgcaagagccggtctgaaggacccgaaacgcccgattggttcattcatcttcctaggccctacaggcgttgggaagacagagctggcaagagcgctggcggaatccattttcggtgatgaggaagcgatgatcagagtggatatgtccgaatacatggagaaacactcgacttcacgtcttgtcggttctcctccgggatatgtcggctatgatgaaggcggtcagctgacagaaaaagtgagaagaaaaccttattctgtcgtattgcttgatgaaattgaaaaagcgcatcctgatgtgtttaacatactcctgcaagtgcttgaagacggacgcttgactgattcaaaaggacgcactgtggatttccgcaacacgatcctgattatgacgtcaaacgtcggagcgagcgagctgaaacgcaacaaatatgtgggcttcaatgtgcaggatgaatcacaaaaccataaagacatgaaagacaaagtaatgggagagctgaagcgtgccttcagacctgagtttatcaaccggattgacgaaattatcgtcttccactcccttgagaaaaaacatcttacagacatcgtgtcgcttatgtctgatcagttaacaaaacgtctgaaagaacaagatctctctatcgagctgacggatgctgcaaaagcaaaagtggcagaagagggcgtcgatttggaatacggtgcacgtccgttaagaagagcgattcaaaagcatgtggaggaccggttatcagaagaactcctcagaggcaatattgataaaggccagcacattgttcttgatgttgaggacggcgaatttgtcgtaaaaacaactgctaaaacgaactaatatagtgacaaacatgaggcatacgtaagcaagtgtatgcctcactttgttatatagagaaatattcgataaggaagaggtcttacaacatatatggctaaatcaaaaacaaaattcatctgccactcatgcggttatgaatccgcaaaatggatgggaaagtgcccgggctgcggggcttggaatacaatggtggaagaaaccataaaaaaagcgccggcgaatcggcgggcggctttctcccactccgttcaaaccgtccagaaaccatcacccattacatcaattgaaacatcggaagaaccccgcgttcaaacaaagctcgaagaattcaacagagtgcttggcggcggcgttgtgaaaggctcgttagtattaatcggcggcgatcccgggatcggaaaatcaacgctccttctccaagtatccgcacaattagctgatacggccggcagcgtgctttacatttcaggggaagaatccgtgaagcaaacgaagctgcgcgccgacagacttggaatccacagccaaatgttacatgttttatctgaaaccgatatggagtatatttcgtctgctatacaagagatgaaacccgcatttgttgtcgtagactccattcagaccgtttaccaaagtgatatcacctcggctcccggcagtgtatcacaagtaagagagtgtacggccgaattgatgaaaatcgcgaaaacaaacggcatacctatttttatcgtcgggcacgtcacaaaagaaggatcgatcgcggggccgagattgcttgagcacatggtcgataccgttctatactttgaaggagagcggcaccatacattccgtattttgcgggccgtaaaaaaccgtttcggctccacaaatgaaatgggcatctttgaaatgcgggaagaggggcttacggaagtgctgaacccttctgaaattttcttggaagagcgttctgccggggcatcgggttcgagtatcgttgcgtcaatggaaggaacgagaccgattctggttgaaatccaggcgctcatttcaccgaccagttttggaaacccgcgccgcatggctacaggcattgaccacaacagggtatcgttaattatggctgtgcttgagaagcgggtgggtcttttgcttcaaaatcaagatgcgtatttaaaggtcgccggcggggtcaaactggatgaaccggcgattgatttggcagtagccgtcagcattgcctcaagcttcagagatacaccgccgaatcccgcagattgctttatcggtgaagtgggtctgacaggagaagtccgcagggtgtcaagaatcgaacagcgcgtaaaggaagcggcgaaactcggcttcaagcgcatgatcatacctgaggcgaatgcagacgggtggacaataccaaaagggattgaggttgtcggagtagcaaatgttgcagaagcgcttcgtacttcattaggaggatcataatagatggaaaaagagaaaaaaggggcgaaacaagagcttgacctgtctgcaattctgcagttcgttgcaccgggcaccccgctcagagccgggatagagaatgtacttcgggcaaatacaggcggcctgattgttgtcggatacaatgataaggtaaagcaagtcgtggatggcggttttcatattaatacatcatttgcgcccgctcacttatacgagctggccaaaatggacggtgccattattttaagtgattccggccagaaaattctttatgcgaatacgcagcttatgccggaggcgaccatttcttcttcagaaacgggaatgagacaccgtacggcggaacgggtggcgaagcagaccggctgtctcgtcatcgccatttctgagcgcagaaatgtcattacgttatatcaggacagcatgaagtacacactaaaggacataggatttattttaacaaaggcaaatcaggccattcaaacgcttgagaagtataaaaccattttagacaaaacgattacggctttaaacgcattagagtttgaggagcttgtgacattcagtgacgtgctgtccgtcatgcatcgatatgaaatggtgctccgaataaaaaatgaaatcaatatgtatattaaagaactcggaacggaaggccacttaatccgtctgcaggtgattgaactgattacggacatggaagaagaggcagcacttttcatcaaagactatgtcaaagaaaaaatcaaagatccgttcgtgctgttaaaagagcttcaggatatgtccagctatgatctgcttgatgattccattctgtttaagctgcttggatatccggcttctaccaatcttgatgattatgtgctcccgagaggatacaggctgctgaacaaaattccgcgtctgccgatgccgattgttgaaaatgtggttgaggcgttcggatttttgccaagcataacggaagccactgtagaagagcttgatgatgttgagggtatcggcgaagtgcgcgccaaaaaaatcaaaaaaggcttaaaacgccttcaggaaaaacactatatagatagacagctttaagaatcgcttaaacctgtcggaatccgggtatattattgttagtttttgtttattctgaatttgtaggctctgacagtctgctgaaaaaatgctacttaaaaggaggtggaggtatgttaaaacgaatagttcaggcgttcttcattattgtgggcggcgttgtcggtatctttttaatacctgaattgtttgtgctgtcaaatatacaggacatacctttaataacaaacgcatatacgtctgctgcaattggtgctattatcttttttctcatcagtatatggacgacagaatatgtgattaattgggtaaaatggattgaagattctttgctgagagctccggtgccggatctgttattcgggagtctcggattggtttttggacttatcatcgcatatctcattgtaaacgtgattccgctggacaatattccgtaccgtatattcagcaccatcattccggtctttctggctttctttctcggttatctgggcttccaagtcggatttaagaaaaaggatgaactgatcagtcttttctccatttctgcaagaatgcagaagaaaaagggaagtgctgatgaggagcaggaggaacaggataaaaggctgaaaatcttggatacaagtgttattattgatgggagaattgcagatatttgtcagacgggctttttagaaggcgtcattgtcattcctcaatttgtgctggaggaattacagcatatcgctgattcttcagatgttttaaaacgtaacagaggacgccgcggactggatatcttgaatcgcattcaaaaggaactggatattacggttgaaatttatgaaggcgacttcgaggacattcaggaggttgacagcaagcttgtcaaacttgcgaagctgacatccggcgtcgttgtgacgaatgattttaatttaaataaagtatgcgagcttcagaaggttgcggtactgaatattaatgaccttgcaaacgcggtgaagccggttgtgcttccgggcgaagagatgaatgtgcaggtgattaaggacgggaaagagcataatcaaggtgtggcttacttggatgacgggacgatgattgttgtggaagaaggccgcaattatatagggaaacatattgatgtgctcgtaaccagcgtactgcagacagcggcgggacgaatgatttttgccaagcccaagctgcttgagaaagctctttaagagggagttcatatggaatatgttgtcgttattccggctgccggacaaggaaaacggatgaaggccgggaaaaataagctgttcatcagcttaaaaggtgcgcctgttattatacacacactgcgggtttttgaaagccacgcaccctgtcagaaaataatcctggtgataaacgagagtgaacgggaagattttcgccagctgctggcccaatttccgattcagacggaaattgagcttgttaccggaggtgcggagcgtcagcacagtgtatacgaaggactgaaagtgattgataaggaagcggtcgtccttgttcatgacggagcgcgaccgtttgtcacacatcagcatatcgataagctcgttgaaacagcagaggaggcgggagcggctgtcctggctgttcctgtgaaagacacgataaaacgggcggaaggctcccgggttgcggagacctttgatcgttcaagcttgtgggccgttcaaacgccgcaggcttttcgtctttctttattgaagacggcgcatatggaagcggaaaacaaaggcttcttagggacggatgacgccagcctcgtcgagcgtcttgatggatatcaggtgagtatcgttgaaggcagctataccaatattaagctgacaacgccggatgacctgatatttgcgaaagcaatcatgaaagcggaaagtgggaatcataatgtttagaatcggacaaggatttgatgtgcatcaattaacggaaggccgtcctctcatcatcggcggaattgaaattccttatgaaaaggggctgctcggacattcagatgcggatgtattgctgcatacagtcgcagacgcgtgtctcggagcggcaggtgaaggagatatcggcaagcatttcccggatactgatccggaattcaaggatgcggactcttttaagctgcttcagcatgtctggaacattgtaaaagaaaaagggtacgtactcggaaatatagactgcacgattattgcgcaaaagccgaaaatggcgccgcatattgatgctatgagaaaacggatagcggaaggccttgaggcggacgtctctcaagtaaacgtaaaagcgacgacgacagaaaagctcgggtttaccggaagagccgaaggaattgccgctcaggcgaccgttctgatccaaaaagcctgatcattgttttgatgcccggtctatttggtggtagaatagatacatatattcggctagaggctacagacgagatgaaaggaagtatttgaacatgggaaatgaagtacgcgttcgttatgcaccgagtccgaccggacatttgcatatcggtaacgccagaacggcgctttttaactatttatttgcccgcagccaaggcggaaagtttattatccggattgaggatacggacaaaaagcgaaatattgaaggcggagagcaaagccagctcaactatttgaaatggctcggcatggactgggatgaaagtgtggatatcggcggagaatacggcccgtaccgccagtctgagcgtaacgacatttacaaaaagtactatgaagagcttcttgaaaaagggcttgcttataaatgtttctgtacggaagaagaacttgagaaagaacgtgaagagcaaatcgcccgcggggaaatgccgcgctattccggcaaacacagaaacctgactcaggaagagcaggagcagtttttagccgaaggcagacagccgagcatccgttttcgcgtgccggaagggaaaatcatcgcatttaacgatatcgtaaaaggtgagatttcttttgaatcagacggcatcggcgactttgtcatcgtcaaaaaagacggaacaccgacgtataactttgccgtcgcgattgacgattacttaatgaaaatgacgcacgtgctccgcggtgaggatcacatttcaaatacaccgaaacagatcatgattttccaggcattcggctgggatgttcctgtcttcggacatatgacgcttatcgtaaacgaaagccgcaaaaaattaagtaaacgtgatgaatcaattatccagtttattgagcagtatgatgagctgggttacctgcctgaagcgctgtttaactttatcggacttctcggctggtctcccgtcggtgaagaagagcttttcacaagagaacaattcattgaaatttttgatgtgaatcgtttgtctaagtcaccggctctgtttgatatgcataaactgaaatgggtcaacaaccaatacgtcaaagcgctggatcttgatcaagtggttgagctgaccctgccgcacctgcaaaaagcaggaaaagtcggcactgagctttctgccgaggagcaggaatgggttcgtaaattaatttctctttaccatgagcaattgagctacggcgctgaaattgtcgagctgactgatttgttctttaaagatgagatcgagtataatcaagaggcaaaagccgttctggaagaggaacaggtgcctgaagtgctcagcgtatttgctgcgaagcttgaagagcttgaagaatttacgcctgagctgatcaaagcctcaatcaaagctgttcagaaagaaacaggccataaaggcaaaaagctgttcatgccgattcgcgtagcggttaccggtcagacacacggtcctgagcttccgcaggccattgagctgatcggcagtgaaacagccgtcagacgcctgaaaagcatttaaatatacgattgttgacagggaagagtataaaacaatgaccattacagaaagaatcttcatcggctgagagagattcatgcgtcatgttttagaagtgcgcccttaagacctttgaagaacatttctgcggaaatcagtatttaaaggcggccgccgccgttaccggcttttaagttgggaaaacagtgacttgtttttcaaacagagtggaaccgcgcggtaaaagcgtctctgtcatgtttacatgcagaggcgctttttttataggcggaaaaacagactggagcggggagagaatggggggaagcatgtgttttttaaaatgctaaaagaagacatagatacagtgttcgatcaagatccggcagcaagaagctatttcgaagttgttttaacttattctggtttacatgctatatgggcgcatcggattgcacatgctttatataaacggagatttttcttcctggcgcgcctgatatcacagattgcccgtttctttaccggaattgaaatccatcccggcgcgaccatcgggagaaggtttttcattgaccacggtatgggggtcgtcataggggaaacatgtgaaatcggcaataacgtgacggtattccaaggtgtcactctcgggggaacgggaaaagaaaaggggaagcggcatccgaccataaaagatgatgctttaattgcaaccggagcgaaggtgctcggctctattacggtcgggcagggttctaaagtaggggccggctccgttgtgcttcgtgatgttcccgacttttcaaccgttgtcggcataccggggaaagtcgtcattcagaacggaagaaaaatcaaacgcgatctcaatcaccaagacttgcccgatccggttgctgacaggttaagagcattggagcagcagatttttgaactgcaggctgaactggaagataaaaaagaaaggatcaaccaaaaatgaccattacactttataatacattgacacggaaaaaggaaacattcgttcctctcgaggaaggcaaagtaaaaatgtacgtgtgcggaccgactgtatacaactatattcatatcggaaacgcccgtccggcgattgtgtatgataccgtacgcaactatttagagtataaaggatacgatgtccaatacgtatcgaatttcaccgatgttgacgacaaactgattaaggcggccaacgagctcggcgaggacgtcccgaccatttctgaacggttcattaaagcgtattttgaagatgtgggcgccctcggatgccggaaagcggatcttcacccccgagtcatggaaaacatggacgccattattgaatttgtcagcgagctgattaaaaaaggctacgcttatgaatcagaaggcgacgtctatttcaaaacaagggccttcgaagggtacggcaagctatctcagcaatcaattgatgaactcagatcaggcgcgcgtatccgtgtcggcgagaagaaagaggatgcgctggactttgctctttggaaagctgctaaggacggagaaatttcatgggatagcccttggggaaaaggccgcccgggctggcatattgaatgctccgcaatggtgaaaaagtatttgggtgacgaaatcgatattcatgccggcggtcaggacctgacattcccgcaccatgaaaacgaaatcgcccaatctgaagcattaacaggcaagacattcgcaaaatactggcttcacaacggatatatcaatatcgataatgagaaaatgtcaaaatcgctcggcaactttgttttggtgcacgatatcattaagcaacatgacccgcagcttttgagatttttcatgctgtccgttcattaccgccacccgatcaactattcggaagagctgcttgagaaaacaaaaaacgcgtttaaccgcctgaagacggcctacagtaatttaaaccatcgtttgattagcagcacgaatctgactgacaatgatgaggaatggctcgctaaaatcgaagagcaccgcactgcgtttgaagaagcaatggatgatgattttaatacggcgaatgcaatttccgtttggtttgatctggcgaagctcgccaattactacatgcaggaagacaatacggcggatcacgtcattaaagcctttatcagcatgtttgacagaatcggatctgttctcggacttacgctcggcgaagaagagcttgtcgacgaagagattgaagagttgattgagaagagaaatgaagcccgccgcaatcgcgattttgctttgtcagaccagattcgcgatcagctgaaaagcatgaatatcattcttgaagatacggcccagggaactcgctggaagcggggagagtaagcggatgcttcaatttgaacaaatcaaagattcaaagcagttaaacggtcttgcgcttgcttatatgggtgatgccatttttgaaatatacgtccggcatcacctgcttaagcagggctttacgaaaccgaatgaccttcataagaaggcgagccggattgtatcggcaaaatcacaggcagacatattgttccgccttcaggacgaatcctttttcacggaggaagaggaagccgtgctgagaagaggcagaaacgcgaaatcagggacgacgcctaaaaacacagatgtacagacgtaccgccatagtacagcttttgaggctttactcggttacctttttcttgagaaaagagaagaaagactgaatcagctgattgctgaggctatacaagtcgggacgtcagggaggaaaacaaatgagtcagcaacatgattacgtcataggaaaaaacgcggtgattgagacgttaaagtcagatcgcaagctgtataagttatggatggcggaaaacacagtaaaaggacaggcgcagcaagttatggagcttgctaaaaagcgcggcgtcaccattcaatttgtaccgaggaaaaaactcgatcagatggtggaggggcagcatcagggtgttgtcgcccaggtggcggcatatgaatatgcacaattagacgaattatataaaagagcggaagagagaaacgaacagcctttctttctcatactggacgagctggaagaccctcataatctcggttccatcatgagaacggctgacgctgtcggtgcacacggcatcgtgattccgaaacgcagagcggtcggactgacttcgacggtcgcaaaagcttcgaccggtgcgattgaacacattcccgtcgtgaaggtgaccaaccttgcccggacacttgatgaaatgaaggagcgggggatttgggtcgtcggaacggatgcatccgcccgggaagactaccgctctatggacggcaagatgcctttggcgctcgttatcggaagcgaaggcagaggaatgggccggcttgtgaaagagaaatgtgattttctcattaagcttccgatggccggaaaagtcacttctctgaatgcgtcggtagcggccggccttctcatgtatgaagtctaccggaagcgcaatcctttaggggaatgaagacagatggacatcctgttagtagacggatacaacatgattggagcttggccgcagctaaaggatttaaaagcgaacagttttgaagaagcgagagatgtactgatccagaagatggcggaatatcagtcctacacgggaatcagagtcattgtggtgtttgatgcacacctggtaaaaggcatagagaaaaaacaaacgaatcacagagtcgaagtgattttcacacgggagaatgaaacggcggatgagcggatcgagaagcttgcccaggcgctgaataatattgcgacacagattcatgtcgcaacctccgattatacggagcagtgggcgattttcggacaaggggctctccgcaaatccgcccgggagctcctgagggaagtggatacgatagaacgccggattcaaaggcgggtttcaaagatcacttctgaaaaaccaccgggtaaaatcgagctgtccgaagaggttttgaaaacgtttgaaaagtggcgccgaggcggtctggattaggttgacgctttttcgcccattaatgtataatatttctatctacgtgcgccggggggatcgcagtgaatctacagaacagcaagggaaagttcaacaaagtgcaattttgccagttggaggacgagcaggtcattgaaaaggttcatgttggggatagtgatgcgttagattacttgattacgaagtaccgtaattttgtacgggcgaaagcaaggtcttattttttaataggggccgacagagaagatattgtacaggaagggatgataggcttatataagtctatccgagactttagagaggacaagcttacttcatttaaagcttttgcagaattatgcattacccgccagattattaccgcaataaagacagctacccgtcagaaacacattcctttaaattcctatgtttctttagacaaacctatttttgatgaagaatctgacagaacactgcttgatgtcatttcaggcgctaaaacgttaaatcctgaagagatgattattaatcaggaagaatttgatgatatcgaaatgaaaatgggagaactgctgagcgatctggagagaaaggtgcttgttttgtacttggacggaagaagttaccaagagatttcagatgacttaaaccgacacgtaaaatcaatcgataatgccctgcagcgcgtgaagcgcaagcttgaaaagtatttagaaataagagagatcagcctgtagcaggtttctgtgtcatattgacagaatttttctgactgtgctattttattaagataaatgaatgtttaggaaaaggtgtaacgacatgagaaaaaagattacgctggcatgcaaaacatgcggaaatcgtaattatacgacaatgaaaagctctgcatcagcggctgagcggttagaagttaagaagtactgcagcacttgcaattcacatacagctcatttagaaacaaaatagtgttcgctttttaaattgtggaggtcttttacatgcgcatgatgagtttctttaaagatgttgggaaagaaatgaaaaaggttagctggcctaaaggcaaagagttaacgcgctatacgatcacggtgatttcaacggttatcttttttgttatcttttttgccctccttgatacaggaatttctcaattaattcgtttaatagttgaataatgatcagcaatacgtgctataatagatcataatatcgtttgccaaaacccgttcagcgggttttttattgtgttgttgaaaaaaggattcataggccctgagcctattttttgttttacacttcatttttaaatgcggggagggaaggactgcagagtcctgatagaatggaaaagaattggtatgttgttcatacgtattccggttatgaaaacaaagtaaaagcgaaccttgaaaaacgtgtggaatcaatgggaatgcaggataaaattttccgcgttgtcgtccctgaagaagaagagactgatattaagaacggcaagaaaaaagtagtcaaaaagaaagtgttcccgggttatgtgcttgttgaaatcgtcatgactgatgattcctggtatgtggtccgcaacacgccgggcgttaccggattcgtcggatcagccggttcaggctcaaagccgactccgcttcttcctggcgaagcggaaaccatcttaaagcggatgggcatggatgagcggaaaaccgacattgattttgaattaaatgagacagtcaaagtcatagacggacctttcgccaactttacaggatcaattgaagagattgattatgataagagcaaagtgaaagtattcgttaacatgttcggccgtgaaacgccggttgaactggaatttacccagatcgacaaattgtaatgtgaaaaaacttgaaattgctatatattaatgataatatagcaaaggtacgtcttggactaatccaaggcagctagcttgatatttcgtcattcatataaagaatgaaaccttgagtgggagggtttaccctattaccacatcacggacttaaggaggtgtgtctcgtggctaaaaaagtagtaaaagttgtaaaattgcaaattcctgctggaaaagctaacccagcgccgccagttggacctgcactaggtcaagccggtgtaaatatcatgggattctgtaaggagtttaacgctcgtacagctgaccaagctggtttaatcattcctgttgaaatttcggtttacgaagaccgttcatttacatttattacaaaaactccgcctgctgcagtattgcttaaaaaagcagctggaattgagtctggttctggtgaaccaaaccgtaataaagtggcaaccgttaagcgcgataaggttcgcgaaatcgctgaaacgaaaatgcctgacttaaacgcagcagacgttgaagcggcaatgcgcatggttgaaggtactgcccgcagtatgggtatcgttatcgaggattaatttgtttcttgtcgggttgcgagttttcacaagttcgcaacccttattcgtgggaggttattccgctataaccacataaggaggaaattttaaaatggctaaaaaaggtaaaaagtacgttgaagctgcgaagcttgtagaccgtgcgaaagcttacgacgtcgctgaagcagtggcgcttactaaaaaaacaaacacagctaaattcgacgctacagttgaagttgcttttcgtttaggggttgaccctcgtaaaaacgatcagcaaatccgcggcgcagttgtacttcctaacggaactggtaaaactcagcgcgtgcttgtattcgctaaaggcgaaaaagcaaaagaagctgaagctgccggtgcagactacgttggcgattctgattacatcgcgaaaatccagcaaggctggttcgaattcgatgtaatcgttgcgactcctgacatgatgggtgaagtcggtaaaatcggccgtgtgcttggaccaaaaggtcttatgccaaaccctaaaacaggaactgttacattcgaagtggaaaaagcaatcggcgaaatcaaagctggtaaagtagaataccgcgttgacaaagctggtaacatccatgttccgatcggaaaagtttctttcgaggatgaaaaacttgttgagaacttcacaacaatgtatgatacaatcctgaaagcaaaaccggctgcggctaaaggtgtttacgtgaaaaacgttgccgttacttctactatgggccctggtgtcaaagtagacgcttctactttcaacgtaaaataatatttgactttagatcagcattctgatatgattcaaaatgttgtaaaatataatatgtcatttataccgtagacagcaggggccgttgaggcttaatatcctgccgaggtgtatatatatcacagctattacgttacgtatgcttgtatatacagcctccatgtccacatggaggctttttatatgaaatcgtcgtcacagtcgtgatcacctagcggtataagtgttacacaaaatctacaggaggtgtaaccatgagcagcgcaattgatacaaaaaaagttgttgttgaagagattgcttctaaactgaaagaaagcaaatcaacgatcatcgttgactaccgcggacttaacgtttctgaagtaactgaactccgtaaacagcttcgcgaagctaacgtagagttcaaagtgtacaaaaacacaatgactcgccgtgcggttgaacaagctgaacttgatggtttgaatgatgtcttaactggaccgaatgcgatcgcattcagtactgaagatgttgtcgctccggcaaaagttcttaacgagttcgcgaagaatcacgaagctctggaaatcaaagcgggcgttatcgaaggaaaagtatcttctgttgaagaagtgaaagctcttgctgaacttccttcacgcgatggcttactttctatgttgcttagcgtacttcaagctccagttcgcaaccttgcacttgcagctaaagcagttgcagaacaaaaggaagaacaaggcgcttaatctgattttaccctaaaataaaacaaatggaggaatttcaaatggctttaaatatcgaagaaatcattgcttccgttaaagaagcaactgtacttgaattgaacgacctagtaaaagcaatcgaagaagaatttggcgtaactgctgctgctcctgtagctgtagctggcggagctgctgctggcggcgctgctgaagagcaaagcgaattcgaccttatccttgctggtgcaggttctcagaaaatcaaagttatcaaagttgttcgtgaaatcactggtcttggcttgaaagaagctaaagaacttgttgacaacactccaaaaccacttaaagaaggtattgcgaaagaagaagctgaagagcttaaagctaaacttgaagaagttggcgcttctgtagaagttaagtaatcttcacttgcctgtaggggaagctcgcttttatgaggcgggctttttctttgcttttctttaagtgccattataaaaggaggttctaataatgagtgatcactattattcagaaaaaccttcagttaaaagcgacaaacagacatggtcatttacactgcggaacagatcttatacattcacaagtgacagcggcgttttctcgaaaaaggaagttgatttcggttcgcgtgtcttaattgaagcgtttgaagagccggagatcgatggtgacttcctggatgcaggctgcggttacggcccgatcggtctgtcactcgccggtgaatttacagaccggaccgtgcacatgattgacgtgaatgaaagagccgtagagctgtcaaatgaaaatgcagaaaaaaacggaataaaaaacgttcggatttatcagagtgatttattttcaaatattgattctgctcaaacatttgcttctattattacaaaccccccaatccgcgccggaaaaaaagttgtccatgccatttttgaaaaaagcgctgagcatttaagggcttcaggtgaattgtggatcgttatacagaaaaaacagggcgggccttctgccattgaaaaactgaaggagctttttgacgaagtttctgtgattcaaaaaaagaaaggctattatatcataaaagcaaaaaaagtttgacttgaattttcagctatgttaatattgtaaaatgccaatgtatatattttgcatgatatgctgaaataatcatagtgcatgtataaattatacaaacatggaaatgctaataaaatcggtatttgtttttggatgtggttttcttaattagaaacccttttttcttttgtcttgtaaaagtatttctttatcgtaagagatgcttattacacatataatacgcatgatttgaggggtgaatcagttgacaggtcaactagttcagtatggacgacaccgccagcgcagaagctatgctcgcattagcgaagtgttagaattaccaaatctcattgaaattcaaacctcttcttatcagtggtttcttgatgagggtcttagagagatgtttcaagacatatcaccaattgaggatttcactggtaacctctctctagagttcattgactacagtttaggagatcctaagtatcccgttgaagagtcaaaagaacgtgatgtgacttactcagctccgctgagagtgaaggttcgtttaattaacaaagaaactggagaggtaaaagaccaggatgtcttcatgggtgatttccctattatgacagataccggtacttttatcatcaacggtgcagaacgtgttatcgtatctcagcttgttcggtctccaagtgtatatttcagtggtaaagtagacaaaaacggtaaaaaaggttttaccgcgactgtcattccaaaccgtggcgcatggttagaatacgaaactgatgcgaaagatgttgtgtatgtccgcattgatcgcacacgtaagttgccggttacggttcttttgcgtgctctcggcttcggttccgaccaagagattctcgatctcattggtgagaatgaatatctccgcaatacactggataaggacaacactgaaaacagtgacaaagcgcttcttgaaatctatgagcgccttcgtcccggagagccgcctacagtagaaaacgcaaaaagcttgctggattcccgtttcttcgatccgaagcgatacgaccttgcgaatgtaggacgctataaaattaataaaaagcttcatatcaagaaccgcctgtttaaccagcgccttgcagaaacactggtggatccggaaaccggtgaaattctcgctgaaaaagggcagattcttgacagaagaacacttgataaagtactgccatacttagaaaatggaatcggcttcagaaaactttatcctaacggcggcgttgtcgaggatgaagtgatgcttcaatccattaaaatctatgctcctaccgatgcagaaggagagcagacgatcaatgtgatcggcaatgcttacatcgaagaggcgattaaaaacattacgcctgctgatattatttcttctatcagctacttcttcaacctcctgcacggagtgggcgacactgatgatatcgaccatctcggaaaccgccgtctgcgttctgtaggtgagctcctgcaaaaccaattccgtatcggtttaagccggatggaacgtgtcgtacgtgaaagaatgtctattcaagacacgaatacaattacgccgcagcagctgattaacatcagacctgttattgcgtctattaaagagttcttcggaagctcacagctttctcaattcatggatcagacgaacccgcttgctgaattgacgcacaaacgccgtctgtcagctctcggaccgggcggtttgacacgtgagcgcgcaggtatggaagtacgtgacgttcactactctcactatggccgtatgtgtccgattgaaacgcctgagggcccgaacatcggtttgatcaactcattgtcatcatttgcgaaagtaaaccgctttggtttcattgagacgccataccgccgcgttgatcctgaaacaggaaaagtaacgcctagaatcgactacctgactgctgatgaagaggataactatgtcgtagcccaagcgaatgctaagctgagcgatgacggttctttcttggatgacagcatcgtagcgcgtttcagaggggaaaacaccgttgtagcccgcaaccgcgtggattacatggacgtatctcctaaacaggttgtatctgctgcgacagcatgtattccgttcttggaaaacgatgactcgaaccgcgccctcatgggagcgaacatgcagcgtcaggctgtgcctttgatgcagccggaagctccgatcgtcggaacgggtatggaatacgtatccggtaaagactccggtgcagccgttatttgtaaacaccctggtatcgtagaacgggtggaagcgaaaaacgtatgggtgcgccgctatgaagaaattgacggccaaaaagtaaaaggcaacctggataagtacagcttgctgaaattcgtccgctccaaccaaggtacgtgctacaaccagcgtccgatcgtcagtgtcggcgatgaagtagtaaaaggagaaatccttgctgacggaccttcaatggagcttggtgaacttgctctcggccgcaacgtaatggtcggcttcatgacatgggatggttacaactatgaggatgccatcatcatgagtgaacgccttgtgaaagatgatgtatacacatctattcacattgaagaatatgaatcagaagcacgtgatacaaagcttgggccggaagagatcacccgcgatattccaaacgtaggggaagacgcgcttcgcaatcttgatgaccgcggaattatccgtatcggcgcggaagtcaacgacggagaccttctcgtaggtaaagtaacgcctaaaggtgtaactgagcttacggctgaagaacgccttctgcatgcgatctttggagaaaaagcgcgtgaagtccgtgatacttctctccgtgtgcctcacggcggcggcggaattatccacgacgtaaaagtcttcaaccgtgaagacggcgacgaacttcctccgggagtgaaccagcttgtacgcgtatatatcgttcagaaacgtaagatttctgaaggtgataaaatggccggacgtcacggaaacaaaggggttatctcgaagattcttcctgaagaagatatgccttaccttcctgacggcacgccgatcgatatcatgcttaacccgctgggtgtaccatcacgtatgaatatcggtcaggtattagaacttcacatgggtatggctgcccgctacctcggcattcacatcgcgtcacctgtatttgacggcgcgcgtgaagaagatgtgtgggaaacacttgaagaagcaggcatgtcaagagacgctaaaacagttctttatgacggccgtacgggagaaccgtttgacaaccgtgtctctgtcggaatcatgtacatgatcaaactggcgcacatggttgatgataaacttcatgcccgttctacaggtccttactcacttgttacgcagcagcctctcggcggtaaagcccaattcggcggacagcgtttcggtgagatggaggtttgggcgcttgaagcttacggcgcagcttacacgcttcaagagatcctgactgtgaagtccgatgacgtggtcggacgtgtgaaaacatatgaagccatcgtcaaaggcgacaatgttccagagcctggtgttccggaatcattcaaagtattgatcaaagagcttcaaagcttaggtatggacgtaaaaatcctttcaggcgatgaagaagaaatagaaatgagagatctagaagacgaggaagatgcgaaacaagctgacggccttgcattatcaggtgatgaagcgccggaagaaacagcatctccagacgttgaacgtgacgcagtaacgaaagaatagtctctgattgataaaggcaagtgacatcggttaatccgaagataaaaagggaggtaggccccttgctagatgtgaacaattttgagtatatgaacatcggtcttgcttcaccggataaaatccgttcatggtcttttggtgaagtgaaaaagcctgaaacgataaactatcgtacgttgaaacctgaaaaggacggcctgttctgcgaacgcattttcggaccgactaaggactgggaatgtcattgcggcaagtacaagcgggttcgttataaaggcgtagtttgtgaccgttgcggagttgaagtaacgcgggctaaagtccgtcgtgagagaatggggcatattgaactggctgccccggtttctcacatttggtatttcaaaggtattccgagccgtatgggtcttgtattggatatgtcaccgcgtgcgctggaagaagttatttactttgcttcttacgtcgtaactgacccggccaatacaccgctcgaaaagaaacagcttttatctgaaaaggaataccgtgcgtatctggataagtacggaaacaaattccaagcctctatgggtgcggaagccattaataaacttctgcaggacatcgaccttgtcaaagaagttgatatgttaaaagaagagctgaagacttctcaaggacagcgccgtacacgtgcgatcaaacgccttgaagtgcttgaagccttccgtaattcaggaaacaagccgtcttggatgatcctcgacgtgcttccggttattccgcctgaattaagaccgatggttcagcttgacggcggacgtttcgcaacgtctgacctgaacgacctttaccgtcgtgtcatcaaccgtaataaccgtttaaaacgtctgttagacctcggcgcgccaagcatcatcgttcagaacgaaaaacgtatgcttcaggaagcagtcgatgctctgattgacaacggacgccgcggccgtccggttaccggaccgggtaaccgtccgcttaaatctctttctcacatgctgaaagggaaacaagggcgtttccgtcagaaccttctcggtaaacgtgtagactactcaggacgttccgttatcgtcgtaggtccgcatctgaaaatgtatcagtgcggtttgccgaaggaaatggcgcttgagctcttcaagcctttcgtcatgaaagagcttgttgaaaaaggccttgctcacaatatcaagagcgcaaaacgcaaaatcgaacgcgtgcagcctgaagtatgggatgtacttgaatctgtcattaaggagcatccggtcttactgaaccgtgcccctactcttcacagattaggtatccaagctttcgaaccgacgcttgttgaaggacgcgccatccgtcttcacccgttagtatgtacagcttataacgctgactttgacggtgaccaaatggcggttcacgtacctttatcagctgaggctcaagctgaagcacgtatcctgatgcttgccgctcaaaacatcttgaaccctaaagatggtaaaccggttgttacgccgtctcaggatatggtattaggaaactactacctgacgcttgagcgtgccggagcagtcggcgagggtatggttttcaaaaatacggacgaagcgcttcttgcttatcaaaacggttatgttcaccttcatacgagagttgctgttgcagcgaaatcccttaagaatgtgacatttactgaagaacagcgttcaaaattgttaattacaactgtcggtaagctcgtcttcaatgaaattcttccggaatcattcccttacatgaatgaaccaacgaagagcaacattgaagagaagacacctgaccgtttcttcttagataaaggtgctgacgtaaaagctgtgattgctgagcagccgatcaacgcaccgtttaaaaaaggcattcttggtaaaatcatcgcggaaatctttaaacgattccatatcacggaaacgtctaaaatgcttgaccgcatgaaaaacctcggtttcagatattcaacgaaagccggcatcacagtaggggtttctgatatcgtcgttctcgatgacaaacaggaaatccttgaagaagcacaaagcaaagttgataatgtcctgaaacagttcagacgcggtttaatcaccgaagaagaacgttatgaaagagtcatttcaatttggagttcagcgaaagatgttatccaaggcaaactgatgaaatcattagacgaagtcaacccgatctacatgatgagtgactcaggagcccgtggtaacgcatctaactttacacagcttgcgggtatgcgcggtctgatggccaacccggctggacggatcattgaattgccgattaaatcgagtttccgtgaaggtctgacagttttggagtactttatctccactcacggtgcgcgtaaaggtcttgccgataccgccctgaaaacagctgactcaggttaccttacacgccgtcttgttgatgttgcgcaggatgttatcattcgtgaaacagattgcggaacagaccgcggtattcttgcaaaaccgctcaaagaaggcacggaaatcatcgagcgtctggaagagcgtctgatcggacgtttcgccagaaaacagatcaaacatcctgaaacgggtgctgtgctcattaacgaaaatgaattgatcgatgaagataaagcgctggaaatcgttgaagccggaatcgaagaagtctggatccgttccgcgttcacatgtaacactcctcatggtgtatgtaaacgatgctacggacgtaaccttgcaaccggaactgatgttgaagtcggcgaggcagtaggtattatcgccgctcaatctatcggtgagcctggaacacagttaacaatgcgtacgttccacacaggcggggttgccggagacgatatcacacaaggtcttccgcgtatccaagagcttttcgaagcgcgtaatccgaaaggtcaagcgacgatttctgagattgacggtacaattgccgaaatcaatgaagtccgcgacaaacagcaggagattgttgttcagggcgctgttgagacacgttcatacacggcaccttacaactcacgcctgaaagtggctgagggtgatcagattacccgcggtcaagtgctgacagaaggttctatcgatccgaaagaacttcttaaagtcactgacctgacaacggttcaggaatatcttctgcatgaggttcagaaggtttaccgtatgcagggggttgaaatcggcgataaacacgtagaagtaatggttcgccagatgcttcgcaaagtccgtgtgatcgatgccggagatactgatgttctccctggcacattgcttgatattcaccaattcacagaagcgaacaaaaaagtgctgcttgaaggcaatcgacctgctacaggccgtcctgtccttctcggtatcacaaaagcttcactcgagacggattcattcttgtctgccgcatcattccaagaaacaacacgcgttcttacagatgctgcgattaaaggcaagcgcgatgaacttctcggcctgaaagagaatgttatcatcggtaagctggttccggccggtaccggtatgatgaattacagaaaagtaaaacctgtttcaaacgttcagccttcggaagatatggttccggctgactaatagaaactgctgcaggaaaggctgtttcgacagcttttcctcagtattacaattattctggcgggggactgcactaaaaaatgtcatacgttgttgacatccgtcccgcagagtgataatataaccaaggtgctcgaaataaaacctgttactttggaggatatgtttatgtcttatgataaagtatcacaggccaaatcaattattattggtacgaagcaaacagtgaaagctctaaaacgaggttcagtgaaggaagtcgtcgtggcaaaagacgcggattcagttcttacagctggcgttatccagcttgcaaagaaccaaaataccgctgtctgtatggtggattccatgaaaaagctcggcaaagcctgcggaattgaagtgggagcagcagctgttgccattatgttatagcgtactttttgtttttatataagatatcaatcttgtgtaaagacattgttttttgcctaatgatgaaccacctgggtatgtgggttataaaacgtaatgaagggaggaacacaacatgcctacaattaatcagctaattcgcaagggacgcgtgagcaaagttgaaaactctaagtcacctgcactaaacaaaggatacaacagctttaaaaaagagcacactaacgtatcttctccacaaaaacgcggggtatgtactcgtgtgggtacaatgacaccgaaaaaaccgaactcagcacttcgtaaatatgctcgtgttcgtttgactaacggaatcgaggttactgcctacattcctggtatcggtcacaacctgcaagagcacagcgttgtactgatccgcggcggacgtgtaaaagacttaccgggggtacgctaccacatcgttcgtggcgcacttgatactgccggagttgaaaaccgtgcgcaaggccgttctaaatacggtacgaaacgtcctaaagcaaagtaatcaaataaatcattaaaactatgaagggaggatattcagatgccacgtaaaggtcctgtagcaaaaagagatgttttacctgatccgctttacaactctaagctggtatcccgcctgatcaacaaaatgatgatcgacggtaaaaaaggtaaatctcaaacaatcctatacaagtcattcgatatcattaaagaacgcactggcaatgatgcaatggaggttttcgaacaagcattgaaaaacatcatgcctgtacttgaagtaaaagcacgccgtgtaggtggagctaactaccaagtgcctgtagaagttcgtcctgaacgccgtacaactcttggtcttcgctggttggttaactatgcgcgtcttcgcggagaaaaaacaatggaagagcgcctggctaacgaaattcttgatgcagctaacaacactggtgctgccgttaagaaacgtgaagacactcacaagatggcagaagcgaacaaagcatttgctcactaccgctggtaggattcatataatcaaaataataattccctaataaggaaggagaaattacccaatggcaagagagttctccttagaaaaaactcgtaatatcgggatcatggctcacatcgatgccggtaaaacgactactacagaacggatcttgttctacacaggccgtatccacaaaattggcgaaactcacgaaggtgcttcgcaaatggactggatggagcaggaacaagaacgcggtatcacaatcacttctgcagcaacgactgcacagtggaaaggttaccgtgtaaacatcatcgatacaccgggacacgtagacttcacagttgaagttgaacgttcactccgtgtacttgatggtgcggttgccgtacttgatgctcaatcaggtgttgagcctcagacagaaacagtatggcgccaagcaacaacttacggagtgccgcgcgttgtatttgtcaacaaaatggacaaaatcggcgcagacttcctttactctgtaggcactttaagagaccgtcttcaagctaacgctcacgcaattcaattgccgatcggcgctgaagacaacttcgaaggtatcatcgacttagtagaaaacgttgcgtatttctacgaagatgaccttggaactcgttcagatgcgaaagaaatccctgaagagtacaaagagcaagctgaagagcttcgcagcagcctgattgaagctgtagctgagcttgatgaagagcttatggaaaagtaccttgaaggtgaagaaatcactatccctgaactgaaagctgctatccgtaaaggtacactgaatgttgaattctaccctgtacttgttggatctgctttcaaaaacaaaggtgttcagcttgtacttgatgctgttcttgactaccttcctgcgccaactgatgttgctgcaatcaaaggtgtacgtcctgacacagatgaagagatcgttcgtcattcttctgatgaagagccattctctgcacttgcatttaaagttatgactgacccttatgtcggtaagctgacattcttccgcgtatattccggtacacttgattccggttcatatgtaaagaactctacaaaaggcaagcgtgagcgcgtaggacgtatccttcaaatgcacgctaacagccgtgaagagatctctactgtttacgctggagacatcgcagctgctgtaggtctaaaagatacttctactggagatactctatgtgatgagaaggatcttgtaatccttgaatcaatggaattcccagagcctgttatcgacgtagcgattgagcctaaatcaaaagctgaccaagataaaatgggtatcgctttagcgaaacttgctgaagaagatcctacattccgtacacaaacaaaccctgaaacgggtcaaacaatcatctctggtatgggtgagcttcaccttgatatcattgttgatcgtatgaagcgtgagttcaaagttgaagctaacgttggtgctcctcaagttgcgtaccgtgagacattccgtaccggtgcaaaagttgaaggtaaattcgtacgtcaatcaggcggacgcggtcagttcggtcacgtttggatcgaatttgaaccgaacgaagaaggcgctggctttgaattcgaaaacgcaatcgtcggtggtgttgttcctcgtgaatacatcccagccgtacaagcaggtcttgaagactctcttgaaaatggtgtcctagccggattcccgctaatcgacatcaaggcgaaactttttgatggatcttaccatgatgttgactcaaacgaaatggcgtttaaagtcgctgcttctatggcattgaaaaatgcagtcagcaaatgtaacccagttcttcttgaaccaatcatgaaagttgaagttgttattcctgaagaatacatgggagacatcatgggggatgttacttctcgtcgcggacgcgtagaaggtatggaagctcgcggtaacgctcaagttgtgcgtgcgatggtacctcttgctgaaatgttcggttacgctactgcccttcgttctaacacgcaaggacgcggtacgttcacaatgttcatggatcactacgaagaagtgccgaagagcatcgctgaagaaattatcaaaaaaaataaaggcgaataattgattttgccacttaactcaagtataactactattgtaagatgaggaagtgaaagcttgctttcactttctatcactctatacattactaattaaaagctcttaaggaggattttagaatggctaaagaaaaattcgaccgttccaaatcacatgccaatatcggtacaattggacacgttgaccatggtaaaacaacattaactgctgctatctcaacagtacttcataagaaatctggtaaaggtacagctatggcgtacgatcaaattgatggtgctccagaagaacgtgagcgcggtatcacaatctctactgcacacgttgagtacgaaactgacactcgtcactatgcacacgttgactgcccaggacacgctgactatgttaaaaacatgatcactggtgctgcgcaaatggacggagctatccttgtagtatctgctgctgatggcccaatgccacaaactcgtgagcacatccttctttctaaaaacgttggtgtaccatacatcgtagtattccttaacaaatgcgacatggtagacgacgaagagcttcttgagcttgttgaaatggaagttcgcgatcttcttagcgaatacgacttccctggtgatgatgtaccagttgttaaaggttctgctcttaaagctcttgaaggtgacgctgagtacgaagaaaaaattcttgaacttatggctgcagttgacgagtacatcccaactccagaacgcgacactgacaaaccattcatgatgccagttgaggacgtattctcaatcactggtcgtggtacagttgctactggccgtgtagaacgcggacaagttaaagtcggtgacgaagttgaaatcatcggtcttcaagaagaaaacagcaaaacaactgttacaggtgttgaaatgttccgtaagcttcttgactatgctgaagctggagacaacatcggtgcgcttcttcgcggtgtagctcgtgaagacatccaacgtggacaagtacttgctaaaccaggtacaatcactccacacagcaaattcaaagctgaagtttacgttctttctaaagaagagggtggacgtcatactccattcttctctaactaccgtcctcagttctacttccgtacaactgacgtaactggtatcatcaatcttccagaaggcgtagaaatggttatgcctggagataacactgaaatgatcgttgaacttatctctacaatcgctatcgaagaaggaactcgtttctctattcgtgaaggcggacgtacagttggttcaggcgttgtttctacaatcactgagtaatcgactcgttcattaatgcggggtcccttatggggcctcgtttttttgtttccccgctgattccatgtataatagaacgtatacaaattttaggagcagaccgatgaacgataacttcaagaaaaccaatcgtatttcaatgcttcagcaattgctgattaatggcagtgaacaaaccattatgattaatggtgatgacaggagtaatccgctgcttttgtttttgcacggcggtcccggcactcctcaaatcggctatgcgagaaaataccagaataagctggaaaagcatttcaccgttgtgaactgggatcagagaggggcgggtctctcttattcaaaggaaattccgggctcatctatgaccttggatcagctgacagccgataccattcatttgaccgaacgcctatgcaagcaattcagcaggcaaaaaatatatatcgccggctattcgtggggttcagttctggcgcttcatgttcttcaagagagacctgatttgtattatgggtatatcggtatcagtcaggtggttaatattcaaaaggaagaaatggaagcttaccggctgatgatggaatggagcaggcaacgcaaacatttcctgctggaaaagacgctgcgctttatcggagcgcctccatgggagaaacagctgcagcgatcgttatttctgctttgtatcgagatgaggggagggggctttacccatcatccgatcggtgctcttaaagcaggggggcgaatgctgtttggtgaaccgtacggtgtgagggggagcttcttagccgcgcgggggcaaatgttcagcctgaaatacctgtgggaggatctcattttctttgatgccggagaatcagtttcttctattataataccgtgctgttttatgtcagggagatacgatttgacggtcccggggacgacgtcttatgaatattatcagaaggttgatgcgccgtataaagaatggcattggtttgagaactcagcccattcgcctcacctggaggaaccggatcgctttgccgaagttgtcagccggttcgcatcgttccatctctgaaagaaaacaggcatatccttgattaatcatggtatcacctgtataataatcaaagtgtgaaaaccacaaggttctttaaataaaccttgcaacatgcgtctattttctgtataatagtgtatgttggtctttgactgcgatgaagtgagaggttgctgacacacccggccgctttgccatggcaaggtgatcaggtttttctcacggagaactgtctaacgtgatgtaggcgaaaaggagggaaaataatggcaaaacaaaaaattcgtattcgtttaaaagcatatgatcatagaatccttgatcaatctgcagagaagattgttgaaacggcaaaacgttctggtgccagcgtatctggtccgattccgttgccaactgaaaaatcagtttacacaatccttcgtgcggtgcacaaatacaaagattctcgtgagcaatttgaaatgcgtacacataaacgtttaatcgacattgtgaacccaacaccacaaactgttgatgctctcatgcgattagacttaccatctggtgtcgatatcgaaatcaaactttaattctaaaatatagaatgatcttaataggaggtgtgacgaatgaccaaaggaatcttaggaagaaaaattggtatgacgcaagtattcgcagagaacggtgatcttatcccggtaactgttattgaagcagctccaaacgttgttcttcaaaagaaaacagctgaaaatgatggctatgaagcgatccagcttggttttgacgataagcgtgaaaagctttcaaacaaaccggaaaaaggacacgttgcaaaagcggaaactgctcctaagcgcttcgttaaagaattacgcggcgtggatatggatgcgtatgaaattggtcaggaagtcaaggttgaaattttctctgcaggagaaatcgtagatgtaacaggagtatctaaaggtaaaggtttccaaggtgcaatcaagcgccacggacaatctcgcggacctatgtctcacggttcacgctaccaccgtcgtcctggttcaatgggacctgtagatcctaaccgtgtattcaaaggtaaactattacctggacgcatgggcggagatcaaatcactgtccaaaaccttgaaatcgtaaaagtagatgctgagcgcaatcttcttttgattaaaggtaacgtacctggtgcgagaaaaactttaatcactgttaaaagtgctgttaaatctaaataagtctcttaggaaaggaggaaattgatcatgccaaaagtagcattatacaaccaaaacggttctactgctggtgatatcgaattaaacgcgtctgtatttggaattgagccaaatgagagcgtagtattcgacgctattcttatgcaaagagcttccttacgtcaaggatctcacaaagtaaaaaatcgttctgaagtacgcggcggaggtcgcaaaccatggcgtcaaaaaggtacaggtcgtgcccgtcaaggttcaatccgttcaccgcaatggcgcggaggtggtgtcgtattcggcccaacaccacgcagctattcttacaaattacctaaaaaagttcgccgcttggcaatcaaatcagtattgtcttctaaagtgaacgacaacaacatcattgttcttgaagatcttactcttgatacggttaaaacaaaagaaatggcagctatccttaaaggattatctgttgagaaaaaagctttaatcgtaactgcggatgcaaacgaagcagtatctctttctgcacgcaacatccctggagttacagttgttcaagctaacggaatcaacgtgttagacgttgtcaaccacgagaagcttctgattacaaaagctgcggttgaaaaagtagaggaggtgcttgcataatgaaagatcctcgtgatgttcttaagcgccccgtcattactgaacgttctgctgatttaatgactgaaaaaaaatatacttttgaagttgatgtaagagctaataaaacagaagtgaaagatgcagttgaaagtatctttggagtgaaagttgacaaagtcaacatcatgaactacaaagggaaatcaaaacgtgtcggccgctacactggtatgactagccgtcgcagaaaagcgatcgtaaaacttactgcagacagcaaagaaatcgaaatttttgaagcttaattatctgtaaaaagaaggagggaaattcaaaatggcgattaaaaagtataaaccgacctctaacggacgtcgtggcatgacaacttcagattttgctgaaatcacgactgaccagccggaaaaatccttgcttgcgccccttcacaaaaaaggcggacgtaacaaccaaggtaaattgactgtacgtcaccaaggtggcggacacaaacgccaataccgtgttatcgactttaaacgcgataaagatggtatacctggacgcgttgctacagttgagtacgatccaaaccgttcagctaacattgcactaatcaactatgtagacggagaaaaacgttacattcttgcaccaaaaggaattcaagtaggtactgaaatcatgtccggccctgaagctgacatcaaagtaggtaacgcacttccgcttatcaacatccctgttggtacagttgtgcataacattgaattaaaacctggtaaaggcggacagcttgtacgttcagctggtacatctgctcaggttcttggtaaagaaggcaaatacgttcttgtacgtcttaactctggtgaagttcgcatgatcctttctgcttgccgcgcttctatcggtcaagtaggtaacgagcagcacgaacttatcaacgttggtaaagcaggacgctctcgctggaaaggcatccgccctacagtacgcggttctgtaatgaaccctaacgatcacccgcacggtggtggtgaaggtcgcgcgccaatcggacgtaaatcaccaatgtctccttggggcaaaccgactcttggattcaagacacgtaagaaaaagaacaaatctgataaatttatcgtacgtcgtcgtaaaaataaataacggggttgtctacggttcatttcggaccgtagtgcaatcacgaagggaggttccaaaatggctcgcagcttgaaaaaaggaccatttgtcgatggacacttgatgacaaaaatcgagaaattaaatgaaacggacaagaaacaagttgtaaaaacttggtctcgccgttcaactattttcccacaatttatcggtcacactatcgcagtatatgacggacgtaaacacgtgcctgtattcatttctgaagacatggtaggccacaagttgggcgaattcgcaccgactcgtacttacaaaggccacgccagtgacgataaaaaaacaagacgctaagagaggaggcttttaaatgcaagctaaagctgttgcaagaacagtccgtattgctcctcgtaaagcacgtctagtaatggacctgattcgaggtaagcaagtaggcgaagcagtatctatcctgaacttaactccgagagctgcttctccgatcatcgaaaaagttttaaaatctgctatcgcaaatgctgagcacaactacgagatggacgctaacaatctggttatttctcaggcatttgttgacgaaggcccaacgttaaaaagattccgcccgcgtgctatgggacgtgcgagccaaatcaataaacgtacgagccacattacaatcgttgtatcagaaaagaaggagggataagtagtgggtcaaaaggtaaatccagtcggtcttcgtatcggagtcattcgtgattgggaatctaagtggtacgctggtaaagattacgctgacttcctgcacgaagatttaaaaattcgtgaattcattagcaaacgcctttctgacgcttctgtttctaaagtagaaatcgagcgcgcagcaaaccgcgttaacattacgatccacactgctaagcctggtatggtaatcggtaaaggcggatctgaagttgaagcacttcgtaaagcccttaacagccttactggcaagcgtgtacacattaacattcttgaaatcaaaagagcagatcttgatgctcagcttgtagctgacaacatcgctcgtcaactagaaaaccgtatttctttccgccgtgcgcagaaacaacaaatccaacgcactatgcgtgctggagcacaaggtgtgaaaacaatggtttccggccgtcttggcggagctgacattgctcgttctgaatactacagtgaaggaactgttccattgcacactttacgtgctgacatcgactatgcaacatctgaagctgacacaacttacggtaagcttggtgtaaaagtctggatctatcgtggagaggttcttcctactaagaagaaaactgaggaaggaggaaaataatatgttattaccaaaacgcgttaaatatcgcagagagcatcgcggaaaaatgcgcggtcgcgctaaaggcggtactgaagtacattttggtgagtacggtatccaggctcttgaagcttcttggatcacaaaccgccaaatcgaagctgcacgtattgcgatgactcgttacatgaaacgtggcggtaaagtttggattaaaattttcccttcaaaaccttacactgctaaaccgcttgaggtacggatgggttccggtaaaggggctcctgaaggctgggtagctgttgtaaaaccgggcaaagttttatttgaaatttctggtgtgtctgaagaggtagctcgtgaagctcttcgtcttgcatctcacaaattgccaattaaaacgaagttcgtaaaacgtgaagaaattggtggtgaatcaaatgaaagctaatgaaattcgtgaccttaccactgctgaaattgaacaaaaagtaaagtctcttaaagaagaacttttcaatcttcgctttcaattagcgacaggacaacttgaaaatactgctcgcattcgtgaagtgcgcaaagctatcgcgcgcatgaaaactgtgattcgtgaaagagaaattgctgccaacaaataatcactgaggggaggtcgtgagcatgagcgaacgtaaccaacgcaaagtttaccaaggccgtgttgtttctgacaaaatggataaaaccatcactgttgttgttgaaacatacaaaaaggatcctatttacggtaaacgcgtaaaatactcaaagaaattcaaagcacatgatgaaaataaccaagctaaaatcggagacatcgtaaagatcatggaaactcgtccattatctgcaactaagcgttttcgtctagtagaagttgtcgaagaagctgttattatctaataaagttcggaattctttttccgaagggaggtaacaaataatgattcaacaagagactcgtttaaaagttgctgacaactccggtgcgcgtgaggtacttactattaaagttcttggcggttctggacgtaaaacggctaacattggtgatgtaattgtttgcacggttaaacaagcaacaccaggaggcgttgtcaaaaaaggtgaagtcgtaagagctgttatcgttcgcacaaaaagcggagcacgcagaactgacggatcatacatcagcttcgatgagaatgcatgtgttatcatccgtgacgacaagagcccgcgtggaactcgtatcttcggaccggttgcccgtgaattacgtgaaaacaacttcatgaaaattgtttctctggctccagaagttatctaatgaaataaatgccttactcaaggaggtgcgatcaggatgcatgtgaaaaaaggcgataaagtaatggttatctctggtaaagataaaggcaaacaaggtacgatccttgctgctttccctaaaaaggaccgcgttctagttgagggcgtaaacatggtgaagaagcactctaaaccaactcaagcaaaccctcaaggcggtatttctaatcaagaggcgccaattcatgtatcaaacgttatgccgctcgatcctaaaacaggtgaagtgactcgcgtaggatacaaagtggaagatggcaaaaaagttcgtgttgcaaaaaaatctgggcaagtcttagataaatagtatttaaaggaagggaggtctatctcatgaaccgccttaaagaaaagtacaataaagaaatttcacctgctttaatgacgaagttcaactacgactctgttatgcaggtgccaaaaatcgaaaaaatcgtaatcaacatgggtgtcggtgatgctgttcaaaacgcaaaagcaatcgacagtgctgttgaagaattaacgtttatcgcaggtcaaaaacctgtcgttactcgtgcgaagaaatcaattgctggattccgtcttcgtgagggaatgcctatcggtgcgaaagtaactcttcgcggagagcgcatgtatgatttccttgataaacttatttctgtatctttaccgcgtgtacgtgacttccgcgggatttctaagaaatctttcgacggtcgcggaaactacactcttggtattaaagaacagttaatcttccctgaaattgactacgataaagtaacaaaggttcgcggaatggacatcgttatcgtaacgactgctaactctgacgaagaggctcgtgagctattaactcaagtaggtatgccgttccagaaataatcaatgaaagggaggcgaaatcgtggctaaaaagtcaatgattgcgaaacaacaacgtacaccaaagtttaaagtgcaagagtacactcgctgtgaacgctgcggacgtccgcactcagtcattcgtaaatttaaactttgccgtatttgtttccgtgagcttgcatataaaggacaaattcctggcgtgaaaaaagccagctggtaatccccaagaatgggaaggaggtaattatataatggttatgacagatccaattgcagatatgctgactcgtattcgcaatgcaaacatggtacgtcatgagaagcttgaaattcctgcttctaaattgaaaagagaaattgctgacattttaaagcgtgaaggtttcattcgtgacgttgagttcgtagaagacagcaaacaaggtatcatccgcgttttcttgaaatacggacaaaacaacgagcgcgttatcactggtcttaaaagaatcagcaaaccaggtttgcgtgtatacgctaaatcaaatgaagtacctcgcgtacttaacggtcttggaatcgcgattatttctacatcacaaggtgttttaacggacaaagaagcccgtgcaaaacaagctggtggagaagttctagcatacgtttggtaagaagtttaacaagaatggaggtgttttagtatgtctcgtgtaggtaaaaaactgcttgagatcccttctggagttacagtaacgctgaacgaaggcaacactgtagctgtaaaaggaccaaaaggagaattaactcgtactttccatcctgatatggaaatcaaaattgaggacaacgtgcttacagttactcgtccttctgatcacaaagagcaccgtgcactgcatggtacgactcgcagtctgcttggaaacatggttgaaggcgtatctaaaggatttgaaagaggtttggaattagtcggtgtcgggtatcgtgcggctaaatccggaaacaaacttgttttaaacgttggatactctcaccctgttgagatcgttcctgaagagggcatcgaaatcgaagttccttctcaaactaaagtagttgtaaaaggtacagacaaagagcgtgtaggagctatcgctgctaacatccgcgctgtacgttctccagagccttacaaaggtaaaggaatccgctacgaaggtgaagttgttcgccgtaaagaaggtaaatctgctaagtaagaccgcttaaagtgaagaaaggagtgacctaaggatgattacgaaaactagcaaaaatgctgctcgtcaaaaaagacatgcccgtgttcgtgctaaactttcaggcacagctgaaagacctcgtctgaatgtgttccgttcaaacaaacacatttatgctcaaatcatcgatgatgtaaatggcgttacacttgctagtgcctctactctcgataaagatttgaacgtggaaagcactggtgacagcgctgctgctgctaaagtcggtgaactcgttgcgaaacgcgcttctgagaaaggtgtttctgacgtagtttttgaccgcggcggatacttataccatggacgtgtaaaagcactggccgatgcagctcgtgaagccggactgaaattttaataaaaaaaggagggacacatgattatgcgtcgtattgacccaagcaaattagagttagaagaacgcttagttacggttaaccgcgtagcgaaagttgttaaaggtggtcgtcgtttccgtttcgcagctctagtcgttgtcggtgacaaaaacggtcacgtaggtttcggtactggtaaagcacaagaagtacctgaagcaatccgcaaagctgttgaagatgcgaaaaagaatttgattgaagtaccaatggttggaactacgattccacacgaaatcatcggacgtttcggtgcaggcaatatcttgttgaaacctgcttctgaaggtactggagttatcgctggaggccctgtacgtgcggtacttgagcttgctggcgttgctgatatcctttctaagtctttaggttctaacacaccgatcaacatgatccgtgcaacacttcaaggtttaagtgagcttaaacgtgccgaagaggttgcgaagcttcgtggaaaatctgtagaagaactgttaggataaggagggaacattaatggctaaattagaaattaccctcaaacgcagtgtaatcggtcgcccggaagatcagcgcgttactgtaagaacacttggtttaaagaaaacaaaccaaactgtcgttcatgaagataacgctgcgatccgcggtatgattaataaagtatctcatctagtttctgttaaagaacaataaaaataaattataggctaaggaggtgtcctaatgaaacttcatgaattaaagccttcagaaggttcacgtaaagtacgcaatcgcgtaggtcgtggtattggttctggtaacggtaaaacagctggtaaaggtcacaaaggtcaaaacgctcgttctggcggcggtgtacgccctggattcgaggggggacaaatgcctttattccaacgtcttcctaaacgcggttttacaaacatcaaccgtaaggattacgctattgtgaacgtagacaaattgaacggttttgcggaaggaacggaagtcactcctgaacttcttcttgagactggtgttattagcaaacttaatgcaggagtaaagattcttggcaacggtaaattagagaaaaaattaactgtaaaagccaataaattctctgcttctgcgaaagaagctgttgaagctgctggcggtacagctgaggtgatctaacttgtttaagacaatctccaactttatgcgtgtgagtgatattcggaataaaatcatttttacattactcatgcttatcgtctttcgcataggtgcgtttatccctgtgccatatgtaaatgctcaggcgttgcagacacaaagttcgatgggggtttttgatctccttaacacatttggcggcggtgcgctttatcagttctccatttttgcgatgggaattacgccttacatcactgcttcaatcatcattcagctgcttcagatggatgttgtgccgaagtttaccgagtggtctaagcaaggtgaagtcggccgccgtaaattagctcagttcacgagatattttacgattgtgcttggttttatccaggcattaggtatgtcttacgggtttaacaacctggcaaacggtatgctgattgaaaaatccggcatatcgacatatctgattattgctttagtactcactggaggaactgcttttttaatgtggctgggagaacaaattacttccaatggagtaggtaacggaatttcgatcatcatcttcgcggggattgtggctagtattccgaaaactgttgggcagatttatgagactcaatttgtcggcagcagcgatcagctgtttattcatattgtaaaaatcgctttactggtgattgcgattttggccgttattgttggtgttattttcattcagcaggccgtacgcaaaatcgcgattcaatatgcaaaagggcaaggtcgttcacctgttggcggaggccagtcaactcaccttccgcttaaagtgaatccggcaggggttattccggtaatctttgcggttgcgtttcttattacgccgcgtactatcgcgtcatttttcggagagaacgatgtgacaaagtggattcaagccaactttgacaatacacatccggtgggcatggcggtttatgtcgcattaattatcgcctttacgtacttctatgcttttgtgcaggtaaaccctgaacaaatggctgataaccttaaaaaacagggtggctatatcccgggggttcgtccagggaaaatgactcaagatagaattacgagcattttgtatcgacttacgtttgtgggttctatattcttagccgtgatttccattcttcctatctttttcattcaattcgctggattgcctcaaagtgcacagattggcggaacatcattgttaattgtcgtcggggtagccttggagacaatgaagcagctggagagccagttagtgaaacgtaattaccgaggatttatgaaaaattagaggactggttttaaccattcctctaaataagagaggacgggggaaatccgaatgaacttagtcttaatgggacttcctggagctggtaaaggcacacagggagaacgaattgttgaggattatgggatacctcatatctcaacgggagatatgttccgtgctgctatgaaagaagaaacaccactcggactcgaagcaaagtcttatattgataaaggcgagctcgtaccggacgaagtcacaatcggcattgtcaaagaaagactaggcaaagatgattgtgaaagaggttttcttctggacggatttccgcgaacagtcgctcaggctgaagctcttgaaaacattcttgaggaatacggcaagccgattgattatgtcattaacattaaagtagacaaagactctttaatggaacgtttgactggacgcagaatttgcagtgtttgcggcacaacctatcatttggttttcaatccgccgaaaacgccgggtgtttgtgataaagacggaggagacctttatcaacgggcagatgataatgaggaaaccgtctcaaaacggcttgaggtcaacatgaagcagactcagcctttactcgatttttattctgagaaagggtatcttgtcaacgtcaatggccagcaggacattaacgacgtgtacaaagatgtgaaagagcttcttggaggattgagcaaatgattatctgtaagacccctcgtgagcttggcatcatgcgggaagcagggcgaatcgtggctttgactcatgaagagatgaaaaagcacattaaaccaggaatctcgacaaaagaattggatcaaattgccgaacgttttattgagaagcagggtgcaatcccatcttttaaggggtataatgggtttcgcgggagcatctgtgtatcagttaatgaagaactcgttcacggaatacccggtaaaagggttttacgtgacggtgacattatcagcattgatatcggtgctaaattaaatggttatcatggtgactctgcttggacatatccggtaggaaacatcagtgatgatgataaacgactgctggaagtaacagaggagtctttatataaaggcttgaaggaagcaaaaccaggtgaacgtttgtcgaatatttcccacgcaatacaaacgtatgtcgaaaatgagcagttttcagttgttagggagtatgtcggacatggtgttggtcaagacttgcatgaggatccgcaaattcctcattacggtccgccaaacaaaggacctaggctgaagcctggtatggttctcgctatagaaccgatggttaacgctggcagccgatatgtgaaaacattggctgataactggacggttgtaacggtagatgggaaaaagtgtgctcattttgaacatacgattgcgattacggaaacgggttttgatatactgacaaaagtctagatgatgaaatgaattccatgacacatgtttttcattccgcacctgggcagattgtaggtttacaattggtcggaagaaaaaccggctagctgctgtcatcggaatgaagattcatcatcgtgtactaaagcagacggagaaaagcgtacatttcattctccttagaaaaagaatatcaatcattcaccctttatgattgcgtatctccggaagttcagaacagtataaacgaaacagggcgtgtgacaaacggataactgagattttctcttttgaaatttgtcagagagcaagttactgatttgaagaagggagaacacttgaatggcgaaagacgatgtaattgaagtggaaggtacgattgtcgaaacactgccaaacgcgatgttcaaagttgaactcgaaaatggccatacggttttggctcacgtatctggtaaaatccgcatgcacttcattcgcattttacctggagacaaagttacggtagaattatctccatatgacttaactcgtggcaggattacgtaccgttacaaataaagcactccggaaactgaaggaggttggaaacacatgaaagtgagaccatcagttaaaccaatctgcgagaaatgtaaagttattcgcagaaaaggaaaagtaatggtgatctgtgaaaatccaaagcataaacaaaaacaaggataattaataaggaggtgcccagagaatggctcgtattgctggtgtagatatcccacgtgacaaacgtgttgttatttctttaacatatgtcttcggaattggccgcacaacggctcagcaagtcttgaaagaggctggtgtttctgaagatactcgtgtgcgtgatcttactgaagaagaacttggtaaaatccgtgatgttattgacaaactgaaagtagaaggtgaccttcgccgtgaagtttctcttaacatcaagcgtctgatcgaaatcggaagctaccgcggaatccgccatcgcagaggtttgcctgttcgcggacaaaactctaaaaacaatgcgcgtactcgtaaaggtccgcgtcgtactgtagctaacaagaaaaaataagtaagggaggtacctaaacaatggctgctgctcgtaaacaaaacacgcgtaaacgtcgcgtgaaaaagaatattgagtcaggaatcgctcatattcgttcaactttcaacaacacgatcgttacgatcactgatactcatggtaatgctctttcttggtcaagtgccggagctctaggattcagaggttctcgtaaatctactccttttgctgcgcaaatggctgctgaaacagctgctaaaggttcaatcgaacacggacttaaaactcttgaagtaactgttaaaggaccaggttctggccgtgaagctgcaatccgtgctttacaagctgccggacttgaagttacagctatcagagacgtaactcctgttcctcataatggatgccgtccaccaaaacgtcgccgcgtgtaatttgtttgtatagattttgtgtccctgtcaataatgggttatgatacagttatttatgaaacgaatgcaccgactcgttgcctgagcacatacgggactaaacaatggggaatttcggatggaatctcatatgattctattcgaggtttcgacgttttgaaggagggttttaagtaatgatcgagattgaaaaaccaaaaatcgaaacggttgaaatcagcgacgatgccaaatttggtaagtttgtcgtagagccgcttgagcgtggatatggtacaactctgggtaactccttacgtcgtatcctcttatcctcactccctggtgccgctgtaacatcgatccagatagatggtgtactgcacgaattctcgacaatcgaaggcgttgtggaagatgttacaacgataatcttgcacattaaaaagcttgcattgaaaatctactctgatgaagagaagacgcttgaaattgatgtacagggcgaaggaactgtcacagcagctgatattacacacgacagcgatgttgaaatccttaatccggatcttcatatcgcgactcttggtgagaatgcgagtttccgagttcgccttactgcacaaagaggacgtgggtatacacctgctgattcgaacaaaagagacgatcagccaatcggcgtgattccgatcgattcaatctttacgccagtttctcgtttatcttatcaggtagaaaacactcgtgtaggccaggttgcaaactatgacaaacttacacttgatgtttggactgacggaagcactggaccgaaggaagcaattgctctcggttcaaagattttaactgaacaccttaatatattcgtcggtttaactgacgaagctcagcatgctgaaatcatggttgaaaaagaagaggatcaaaaagaaaaagttcttgaaatgacgattgaggaacttgacctttctgtccgttcttacaactgcttgaagcgtgcgggcattaacacggttcaagaacttgcgaacaagacggaagaagatatgatgaaagttcgcaacctgggacgcaaatcacttgaagaagtgaaagcgaaactagaagaacttggactcggccttcgcaaagacgattgatctagtttccatgtgaactaggattttcgtgtgttttttatttagaaacagcattccattaaaggaggggacatcacatgtcatacagaaaactaggacgtacgagttcacagcgtaaagctatgcttcgtgatcttacaacagatttgatcatcaacgaaagaattgaaacaactgaaacacgtgcgaaagaacttcgctctgttgttgaaaagatgatcactcttggtaagcgcggtgacttgcatgctcgtcgtcaagcagctgcatacattcgcaacgaggttgctaatgaagaaaataaccaagatgcacttcaaaaattattctctgacattgcaactcgttacgaggagcgccaaggcggatacacacgtattatgaagcttggtcctcgccgtggtgacggtgcaccaatggcaatcatcgaattggtttaatcacatatttttgtgtatctaaagaagggcgggacagtttctaactggatctatgccctttttttagatatcagaactttttatcatgagacagaaaagcagagctatagctgagaggaggtcaggcgcccgtggatcaaaaacagcttatatccgtaaaagacattctattccgctaccgcaaagatgcagaaagaccggcactggacggtgtgagtctggaggtatacgaaggagaatggcttgctatcgtaggccacaacggttcagggaagtcgactttggccagagcgctgaacggactgattttgcccgaggccggagaaattgaagtcggcggcatcaaactgactgaggataccgtgtgggatgtgcgaaaaaaaatagggatggtctttcagaatcccgataaccaatttgtcggaacgactgttcgcgatgatgtggcttttggtttagaaaacaatggtgttccgcgcgaagaaatgattgagagagtagattgggctgtcacacaagtcaatatgcaggattttcttgatcaagagccgcaccatctctccggaggtcaaaaacaaagagtggcgatcgcgggaattattgccgcgcgtcctgatattatgattttggatgaagcgacatccatgcttgacccgattgggagagaagaagtccttgatactgtcagacgcttaaaagatgagggcatggccaccgtcatttcgataacacatgacctggaagaagccgcaagggcggacaggatcattgtgatgaacggcggcaggaaatatgcagagggcacgcctgaagagatttttaaattaaacgaagacttggttcgcatcggtcttgatttgcctttctcattccagctcagcctgcttttgaaagaaagcggactggcgttaacgaaaaaccatctgactcaggaagggctggtgaatgagctgtggacattaaaatcaaagatgtagaacaccgctatcaaatgaagacaccgtttgaacggctggctctgtatgatatcaatgccgtgataaaagagggcagctacgttgccgtcatcgggcatacagggtcgggcaaatcgacgctcctgcagcatttaaacgggttgctgaaaccgactaaaggacagcttgaactcgggagcacgattctggcagccggtaaaaagaataaagatcttaagactttgcgaaaaaaagtcggaatcgttttccaatttcccgaacatcagctgtttgaagagactgtgctgaaggacatcgcattcggaccgatgaattttggtgtaaaaaaagaagacgctgaacggaaagcaaaagaaatgctggggcttgtgggccttccggaagacattttggatcgttcaccatttgagctcagcggcggccagatgcgcagagtggcgattgccggcgttctcgcgatggagccggaagtgctggttttggatgaaccgacggccggtcttgatccgagagggcgccaggacattatggacatgttctatgcgcttcatcagcggggaaacctgactaccgttctcgtcacccacagcatggaggacgccgcccgttatgccgacgaaatgatcgtcatgcacaaagggaccattaaagcgacggggagtccgcgtgacttgtttgtaaaaggtgaagagatggccgaaatgggactggatcttcctgaatcggtgaagtttcagagacggcttgagaaggctctcggagtcaagtatgaaaaacccatgctgaccctgcaggatgccgccagtgaaatcaaggctttctttcaggaggaaaaggaccaatgatggacagcatgattatcggaaagtatgttcccggatcatcgcttattcaccgattggacccgcgaacaaaacttgtcagcatctttctttttgtatgtatcgtttttttggcaaacaacgtacagacgtacgctttgctcggtttgtttacattcggggtgatcgccttgactcgcgtgccgttcagctttttgctgaaggggcttaagccgattatctggattgtggcgtttacctttttattacacattttcatgacgcatgaaggatctgtcatttttcagcttggctggtttaaagtgtatgagggcggacttatacaggggatttttatctccctccgtttcgtttaccttatctttatgacgacgctgctgacgctgacaacaacgccgattgaaataacggatggaatggagcagctcctgaatccttttaaaaaggtgaagctgcctgtacacgaactcgcattgatgatgtcgatatcattgcgatttatcccgacattgatggaagagacagataaaatcatgaaggcgcaaatggcgaggggtgcggactttacaagcggcccggtgaaagacagaatcaaagcggttgttccgctgcttgtcccgctgtttgtcagcgcctttaaacgcgcggaagagctcgcggtcgccatggaggcgagaggctaccagggcggtgaggggagaacgaaatacagaaagctcgtctggaccggaaaggataccggagctattctgttcatcatcgtattagccgtgttattgtttttcttaagaagttagaggtgctgctgaatgagagtgaaatgtaccattgcttatgacgggcatttatttaacggatatcaggttcagcctggaaaacggaccgttcaaagtgaattggaaaaagcgctggccgtcatccataaaacggacggcagagtgcctgtgtactcatccggccgcacggacagcgatgttcatgctgccgggcaggtcattcattttgatacaccgctgtccatcccggctgagaaatggccgtttgcgctcaatgccctgctgcctgatgatattgccgtcaaaacagcagagattgcggatgatgggttccatgcacgatttagcgcggtccaaaaggaatatcgctactttgtatatacggagaaacacccggacgtatttaaacgacattacgcttaccattttgcatatccgcttaatgtgcagaaaatgagggaagcttcaaggcacctcgtcgggacacatgatttcacaagcttttgcgcggctgataccgcggttcaggataaagtcagaacgatttacgagctggattggactgagaccggagacggcctgcagatgcggatcaccggaaacggttttctctataatatggtcagaatcattgccggaacgttattggatacaggagctggaaaattttctcccgatgatgtaaaagcaatgctcgaagcgaaggatcgtgaagccgcggggcgcaccgcaccggggcacgggctgtatttatggagcgtttgctatgacaactaaaccaggtgtaacattttcttgacagagtctgcataaagttataagatatcatatggtatgtatttcaaccccacgataagccccggaacttattgtgttgtgaaatagaacgtaatcgaagattattgaaaatgacagattatttaggagggaaattcaatgcgtacaacacctatggctaacgcaagtactattgaacgcaagtggttagttgttgatgcagcaggcaagactttaggacgtctttctacagaagttgcatctatccttcgcgggaaacacaaaccgacttacacaccgcacgttgatactggagatcatgtgatcatcatcaacgctgaaaaaatcgagttaactggtaaaaagttaactgacaaaatctactaccgtcacactcaacatccaggcggattaaaatcaagaactgctcttgaaatgcgtacaaactaccctgagaaaatgcttgagcttgctatcaaaggcatgcttccaaaaggttctctaggtcgtcaaatgttcaagaaattgaacgtataccgtggttctgagcatccacatgaagcacaaaaacctgaagtttacgaacttcgcggttaattaaaaaggaggttaccaatttggcacaggttcaatattacggtactggccgtcgtaaaagttctgtagcgcgtgtgcgcttagttccaggtgaaggtcgtatcgtcgttaataatcgtgaaatcagcgagcacattccatctccagctctaatcgaagatatcaaacaaccattaactttaactgaaacagctggtacttatgatgttttagtaaacgtacatggaggcggcttatctggtcaagctggagcaatccgtcatggtatcgctcgtgctttgcttgaagcagatccagaataccgtgcaacacttaaacgtgctggtcttctcactcgtgacgctcgtatgaaagaacgtaaaaaatacggtcttaaaggcgctcgtcgtgcacctcagttctcaaaacgttaatcgttttggatggcaaaaaccacaacttcttggttgtggtttttttgtatttttttctcatattcaagaggttatccgatgtttttctagaattgtttgttatactctattcattaccaataaggagcgcagttataatgaataagttagtcatacataacagcaaggcatgggataaaaaagtcgaaacaggcaatgaatggacggttgcggttgattctcatacgattggtgaagcgaaaaaaggcaattggagcatcagaatgacccccggaaaagatgtgccggcggattggtttccgcccatagacggtctgaaggttctttgtctcgcttcaggaggaggacagcaagggccggtccttgctgctgcaggagcggacgtgaccatctttgacaattcggaaaaacagcttgcgcaagacagaatggttgccgagcgggacgatcttacgcttcgcactgtcaaaggcagcatgaatgatctgagctgttttgatgatgagtcatttgattttatcgtgcacccggtatcgaattgctttgttgatacggttcttccggtatggaaagaagctcatcgcgtattgaaaaaaggcgggtctttagtctccggttttgtaaatcccgtcgtgttcttatttgatatggatttagagcaggaaggcgtactaaaagtaaagtattccattccgttttcggatgaaaaggatctgagtaagaaaaaggtaaaggaacttattgataatcatgaagcgcttgaattcggccatacgctggaggatcaaattaaaggtcagattgacgcaggcttcatggttgccggtttttacgaagacaaaggcggcctcgtgctggatgaatacattaatacatactccgtaacaagaagcattaaaatataaaaacggcatcccgtcagaggtgctgtttttttgcggctttttcctgcggacggctgatcacattagccgaaaccggttctattccaatttctctggcccaaaccgacagttgtcccatatggtgaatctcatgcgcaaggatgtggcggagaatatcttctttaggaaaggtttggtccatccattccggcttaacaaaatccggtcctttgcgggagaccgcatgaatgacatccttccgatattgttcagacagctttctgagatcctgaatgctcgtatagtcagactcagcaggtaaaacatcatctttacctaaaatggcacgagcccagctgatctcgacatcaatgatatgaaataaagtgcgcaagatgctcttcattccgcccgtccgggttttcgtcagttcctcccggctcagcttttcacatatcataaaccactcgtcacgcaccgtccaattgtattgaaacagctttttcataacgtcacctcagctctttattcttccagttaacataaaactccttcatttgggaggatttccactatcaacaaagcatgctttttcccttttcctttcaaaataacagtaaaaaggagcgtggctgacaatggcagaagtattatctttttcagacgtgaaacggcagaaggattttgagcttgagaagagtttactaaaggagctgtcactgacgcagatcattcagtccgtaaaagcatgtcttacccctttgtttccctttcttcaagacgaaaacggcattctgagtgaaggatgcatagattttgcaattgaagcgtatttattaggcggccggttcggcgtctttggctattatggtgagtccttgcagagggcaaacgcccgttcggcagaagaagaggaagaactgacggccgatttttttgaatatctttgcaattggacgcatgagcaatattcttccgttgaacaaaaagaaatctatgaagcgtcctgccggtttatcaacagctggtggacggaaggatttctgcaaagagaaaaacaatgtaagctccgcatgaggtaatcataatttcttcccttgtcccatatttattaataacggggacaagcgggagggaaaggtatgacaaaaaagctgaaatggctcggttttttacttggctttatcatattattgtgtttattccggtttcaattccataatgatgattcctggcggccgtggagtctgccgctgagcgggaaaatcatctatctcgatccgggacacggcggaccggacggaggcgccacgggaggcagtcaccttgaaaaggacattactctcgaagtggcctccagggtcagagactatttgcaggagcagggagctttggtcattatgacgcgggagacggatactgatttagctcctgaagggacgaaaggctacagcagacgcaaagcggaagatctgagaaagcgcgtggaaatcatcaaccgttcagaggcggagctttatatcagcattcatctgaacgccataccgtcaccgagatggagcggcgcccaaagcttctactatggaaaatacgaagagaatgaaaaagtagcaaaatatatacaggacgaattgagaatcaatttggagaatacaacgagaaaggcgaaacggatacacggcatttacttaatgcagaatgtaaccaaaccgggcgcgctggtggagatcggatttctgtccaatcccgcggaagcgaaaaggctcggccagcccaaatatcaggacaaaatcgcttcttccgtgtataagggcgtattgagatacttcacagagaaaggagaccctcccgagtaaggagggtttttcgccgattctatgtttaatatatggtataataccatttgtaaacgaatacacaaagggtgagggttcgatgataagagaagatgaagtaagaaatatagtcggaaacatgcgcgaaccttttcttcatagaccgctgggagaattggatgccattaaagaagtaaagatcaagccggaaaaacggcatgtcagtgtgaaaattgcattggcaaaaacggggacggctgaacagatgggtattcagcaggaaatcgtatccgttctgaaagaagcgggtgcggaaactgtgggactgcggtttgaagagctgccggaagaaacattggcgaaattcagccggccggctgctgaaagcgaaaccctgctgaataggaaacatccgccggtctttcttgcggtggcaagcggaaaaggcggtgtcggcaaatcaacggtttccgtcaacctggccatttctcttgcgcggctcggaaaaaaagtcggcttgatcgacgcggatatatacgggttcagcgtgccggacatgatgggtattacagtccgcccgacagtagaaggagaaaaactgcttcctgtcgaaagatttggagtaaaggttatgtcgatgggctttttcgtcgaagaaaacgctccggttgtgtggagagggccgatgctgggcaagatgctgaataacttcttccatgaggttgactggggagaggttgactatatcgttctcgatctgccgcccggcacgggtgatgtggcgctcgatgtacacacgatgcttccgagctgcaaagagattatcgtatcaacgccgcaccctacagctgcatttgtagcggcgagagcgggttctatggcgattaagaccgatcatgaagttgtaggggtcattgaaaatatggcttactatgaaagtgcaaaaaccggcgagagagaatatgtgttcggtcaaggcgggggagataagcttgcagaggaattgcaagtgccgctgcttggcagaattcctttaaaacagcctgattgggacaaggatcagtttgcgccttctgtctatgacagaagtcatccgatcggggaaatttatatggggatcgcccagaaagtcattgaaaaaacagctgaataaaaaaggggccgggatcaacacggcccggccttttattggctttctttttcagagcttgaagctgcttttttcaattcatcctcgaattgctttttgaaaagcgggctggaaagtgtctctgtaattacatcttctaagtaactgcggaacttttggcttttcaccagctcatagtattttttatccatgccggggtcctgcatgatctgcataaaacttttctgataatcagggtctttcatcagtttttttatgattttttcatgctcgggctgaagagtttttgcaaagctctcggcgaattttgagtcttcaaagatggttttccagaactccgccccttttttagaggtgagggttttctctattgtgcctttaatggcattttgatcaatcaccaatgcctcattcatcgcatcatcatttaatatttccttaattgccttttttccatcatcggtctttaatatatcaacaaccatttttttagtctggtcataatccatatccgctgcttggtcttttggagcacaagctgttacagataataaaacaaaacagcttatcaatagcgttttggcttttgacatgcataagctccttccttacttgtacttatttttaatatgattcatcggaatggatttatacataacaaaatatcgctgaacgcgattgtcagggggatgaataagagatgaaaagccgcgggcttgttcgatttttcttttcgattttagctgtgggcgctcttattacaagcgtcgtgggatttgctctgaagtggggggagtacaaggggttctttctgaattttgaggccggtcagattttctccgttctgatctggtttatcggggtaggcatgattttcagtgtgatcagccagatgggattcttcgtttttctgacggtgcaccggtttgcccttgaaattctcagatcaagctcgctttggaatctgcttcagctgtttatcattttgtttgtcgcttttgatttaatgtacgtcagatttttgtttttcggagagcgggatgactcgattgcagggtttgtctggctgccgctggctttgcttgccgtcggcctgttgacggcatatataaaacaaaagcagtcctcaaaaaatacgttcgtttcatcattatttttaatggtcgttattacagcgcttgaatgggttcctgcgctacgagtgaataatgaggactggctttatttgatgctgattccgctgatgggctgcaatgcgtttcagctgctaatgctgccgaagtttgcccagaggtaattatttcacttctgatgacttgacgtcagtatttgcgatcaggtcgccgacggtcacgtttttcagtcctttttgctttaaattgtgaatgatggcggggagcgcttcttcagtctgtgttgctgaatcagaggcgtgcagcagaacaatgtcgccgccttttatatgactgtttacattttcaatgattttatcagggccgggatttgtccaatcctgcgagttaacgctgtaatgaaccactgaatagtggtactgctgtgcaatggtaagaacctttttattaaattgtccggtcggcggacggagtaaatgaacattcttcacacccagctttttaaatgcagtctgggcccggaggatatctttttttatttcattgtcctctaggttggtataattcttatacgcatatcccatgctgccgatttgatgtccgtcttttatcatacgttcaactgtgtccgggtgccgttccgcccaagaagctgacagaaaaaaagtggcgtttttaataccgtttgcttttagcgcgttcagaataggaactgctttttcgtcgccccagctgatatcgaatgttaatgcgacttcgcccgctttcgtctccccttttgaaatagccttcgggccgctatcagttaaaaatacaggaagggggactgctctctgtatataaaaaaagctggctgctgcaaatgcggcaatgataataataagcagctgttttatccttctgatgtgccacacgtagaagtgattcactgatgacgcctccttatcttgtccatgcttgattacatcgtatgccgcgtcggagatgaacataccgaaatccgttttaaaaaaatgaaaaaaacacttgctaaattcagcgaatgcatggtatattattaaacgtcgctgatgaacagcagacaacaacaaaaagcttcggaaacaacttaaaaaaagttgttgacataaaagaagctgagtggtaagataataaagctgcttcaacaagcggtaatgatctttgaaaactaaacaagacaaaacgtacctgttaattcaaagttttaaataaatcgcacagcgatgtgcgtagtcagtcaaactactttatcggagagtttgatcctggctcaggacgaacgctggcggcgtgcctaatacatgcaagtcgagcggacagatgggagcttgctccctgatgttagcggcggacgggtgagtaacacgtgggtaacctgcctgtaagactgggataactccgggaaaccggggctaataccggatggttgtctgaaccgcatggttcagacataaaaggtggcttcggctaccacttacagatggacccgcggcgcattagctagttggtgaggtaacggctcaccaaggcgacgatgcgtagccgacctgagagggtgatcggccacactgggactgagacacggcccagactcctacgggaggcagcagtagggaatcttccgcaatggacgaaagtctgacggagcaacgccgcgtgagtgatgaaggttttcggatcgtaaagctctgttgttagggaagaacaagtgccgttcaaatagggcggcaccttgacggtacctaaccagaaagccacggctaactacgtgccagcagccgcggtaatacgtaggtggcaagcgttgtccggaattattgggcgtaaagggctcgcaggcggtttcttaagtctgatgtgaaagcccccggctcaaccggggagggtcattggaaactggggaacttgagtgcagaagaggagagtggaattccacgtgtagcggtgaaatgcgtagagatgtggaggaacaccagtggcgaaggcgactctctggtctgtaactgacgctgaggagcgaaagcgtggggagcgaacaggattagataccctggtagtccacgccgtaaacgatgagtgctaagtgttagggggtttccgccccttagtgctgcagctaacgcattaagcactccgcctggggagtacggtcgcaagactgaaactcaaaggaattgacgggggcccgcacaagcggtggagcatgtggtttaattcgaagcaacgcgaagaaccttaccaggtcttgacatcctctgacaatcctagagataggacgtccccttcgggggcagagtgacaggtggtgcatggttgtcgtcagctcgtgtcgtgagatgttgggttaagtcccgcaacgagcgcaacccttgatcttagttgccagcattcagttgggcactctaaggtgactgccggtgacaaaccggaggaaggtggggatgacgtcaaatcatcatgccccttatgacctgggctacacacgtgctacaatggacagaacaaagggcagcgaaaccgcgaggttaagccaatcccacaaatctgttctcagttcggatcgcagtctgcaactcgactgcgtgaagctggaatcgctagtaatcgcggatcagcatgccgcggtgaatacgttcccgggccttgtacacaccgcccgtcacaccacgagagtttgtaacacccgaagtcggtgaggtaacctttatggagccagccgccgaaggtgggacagatgattggggtgaagtcgtaacaaggtagccgtatcggaaggtgcggctggatcacctcctttctaaggattttaacggaatataagaccttgggtcttataaacagaacgttccctgtcttgtttagttttgaaggatcattcgattcttcgagatgttgttctttgaaaactagataacagaagtaattcacattcaattagtaatgcaagatatcacgtagtgattctttttaacggttaagttagaaagggcgcacggtggatgccttggcactaggagccgatgaaggacgggacgaacaccgatatgcttcggggagctgtaagcaagctttgatccggagatttccgaatggggaaacccaccactcgtaatggagtggtatccatatctgaatacataggatatgagaaggcagacccggggaactgaaacatctaagtacccggaggaagagaaagcaaatgcgattccctgagtagcggcgagcgaaacgggaccagcccaaaccaagaggcttgcctcttggggttgtaggacactctgtacggagttacaaaggaacgaggtagatgaagaggtctggaaaggcccgccataggaggtaacagccctgtagtcaaaacttcgttctctcctgagtggatcctgagtacggcggaacacgtgaaattccgtcggaatccgggaggaccatctcccaaggctaaatactccctagtgaccgatagtgaaccagtaccgtgagggaaaggtgaaaagcaccccggaaggggagtgaaagagatcctgaaaccgtgtgcctacaagtagtcagagcccgttaacgggtgatggcgtgccttttgtagaatgaaccggcgagttacgatcccgtgcaaggttaagcagaagatgcggagccgcagcgaaagcgagtctgaatagggcgaattgagtacgtggtcgtagacccgaaaccaggtgatctacccatgtccagggtgaagttcaggtaacactgaatggaggcccgaacccacgcacgttgaaaagtgcggggatgaggtgtgggtaggggtgaaatgccaatcgaacctggagatagctggttctctccgaaatagctttagggctagcctcaaggtaagagtctcggaggtagagcactgattggactaggggcccctaccgggttaccgaattcagtcaaactccgaatgccgatgacttatccttgggagtcagactgcgagtgataagatccgtagtcgaaagggaaacagcccagaccgccagctaaggtcccaaagtatacgttaagtggaaaaggatgtggagttgcttagacaaccaggatgttggcttagaagcagccaccatttaaagagtgcgtaatagctcactggtcgagtgactctgcgccgaaaatgtaccggggctaaacgtatcaccgaagctgcggactgttcttcgaacagtggtaggagagcgttctaagggctgtgaagcaagaccggaaggacttgtggagcgcttagaagtgagaatgccggtatgagtagcgaaagaggggtgagaatcccctccaccgaatgcctaaggtttcctgaggaaggctcgtccgctcagggttagtcgggacctaagccgaggccgaaaggcgtaggcgatggataacaggttgatattcctgtaccacctcctcaccatttgagcaatggggggacgcaggaggatagggtaagcgcggtattggatatccgcgtccaagcagttaggctgggaaataggcaaatccgtttcccgtgaaggctgagctgtgatggcgagcgaattatagtagcgaagttcctgattccacactgccaagaaaagcctctagcgaggtgagaggtgcccgtaccgcaaaccgacacaggtaggcgaggagagaatcctaaggtgatcgagagaactctcgttaaggaactcggcaaaatgaccccgtaacttcgggagaaggggtgctctgttagggtgcaagcccgagagagccgcagtgaataggcccaggcgactgtttagcaaaaacacaggtctctgcgaagccgtaaggcgaagtataggggctgacgcctgcccggtgctggaaggttaagaggagcgcttagcgtaagcgaaggtgcgaattgaagccccagtaaacggcggccgtaactataacggtcctaaggtagcgaaattccttgtcgggtaagttccgacccgcacgaaaggcgcaacgatctgggcactgtctcaacgagagactcggtgaaattatagtacctgtgaagatgcaggttacccgcgacaggacggaaagaccccgtggagctttactgcagcctgatattgaatgttggtacagcttgtacaggataggtaggagccttggaaaccggagcgccagcttcggtggaggcatcggtgggatactaccctggctgtattgaccttctaacccgccgcccttatcgggcggggagacagtgtcaggtgggcagtttgactggggcggtcgcctcctaaaaggtaacggaggcgcccaaaggttccctcagaatggttggaaatcattcgcagagtgtaaaggcacaagggagcttgactgcgagacctacaagtcgagcagggacgaaagtcgggcttagtgatccggtggttccgcatggaagggccatcgctcaacggataaaagctaccccggggataacaggcttatctcccccaagagtccacatcgacggggaggtttggcacctcgatgtcggctcatcgcatcctggggctgtagtcggtcccaagggttgggctgttcgcccattaaagcggtacgcgagctgggttcagaacgtcgtgagacagttcggtccctatccgtcgcgggcgcaggaaatttgagaggagctgtccttagtacgagaggaccgggatggacgcaccgctggtgtaccagttgttctgccaagggcatcgctgggtagctatgtgcggacgggataagtgctgaaagcatctaagcatgaagcccccctcaagatgagatttcccattccgcaaggaagtaagatccctgaaagatgatcaggttgataggtctgaggtggaagtgtggcgacacatggagctgacagatactaatcgatcgaggacttaaccaatttgaatgtatgcttactgttatctagttttgagagaacactctcaatggtttggtggcgatagcgaagaggtcacacccgttcccatgccgaacacggaagttaagctcttcagcgccgatggtagtcgggggtttccccctgtgagagtaggacgccgccaagcttttttattttatctaccatgtttttgtttatgaagcttataatattccgcagtagctcagtggtagagctatcggctgttaaccgatcggtcgtaggttcgagtcctacctgcggagccattgcttccatagctcagcaggtagagcacttccatggtaaggaagaggtcagcggttcgagcccgcttggaagcttatctaaatacattgatctgaagcagtttcctcatgttatggaactgttatttttttgttcagttcagtaaaaatctgttactgattgtaccagttaaggtataggtatttagcgcgtcttctgatgaagcctttcttcaagggtgcaaaagagattaacataattaattgttaatcggtattgacttttatcaaaaccttgatataattacttttgtcataatgaacagtatcctttagattattctgcgggttataccgtttggagttttactgaataaataacaatacagtttttgggttatctgatgctgtattctggctgtacattacatttttacttgcggaagtagttcagtggtagaacatcaccttgccaaggtgggggtcgcgggttcgaatcccgtcttccgctccattttatcccaacgggatattgtgaaattgattgcgcccgtagctcaattggatagagcgtttgactacggatcaaaaggttaggggttcgactcctctcgggcgcgccataatatatttaaaaatcgggaagtagctcagcttggtagagcacatggtttgggaccatggggtcgcaggttcgaatcctgtcttcccgaccattctcaaactttaaagataatatactggttttctttttttctcttttttaaaaaaaatgcttgatttatagagagacaccgtggtatattattaaacgtcgctgatgaacagcagacaacaacaaaaagcttcggaaacaacttgaaaaaagttgttgacataaaagaagctgagtggtaagataataaagttgcttcaacaagcggtaatgatctttgaaaactaaacaagacaaaacgcacctgttaattcaaagttttaaataaatcgcacagcgatgtgcgtagtcagtcaaactactttatcggagagtttgatcctggctcaggacgaacgctggcggcgtgcctaatacatgcaagtcgagcggacagatgggagcttgctccctgatgttagcggcggacgggtgagtaacacgtgggtaacctgcctgtaagactgggataactccgggaaaccggggctaataccggatggttgtctgaaccgcatggttcagacataaaaggtggcttcggctaccacttacagatggacccgcggcgcattagctagttggtgaggtaacggctcaccaaggcgacgatgcgtagccgacctgagagggtgatcggccacactgggactgagacacggcccagactcctacgggaggcagcagtagggaatcttccgcaatggacgaaagtctgacggagcaacgccgcgtgagtgatgaaggttttcggatcgtaaagctctgttgttagggaagaacaagtgccgttcaaatagggcggcaccttgacggtacctaaccagaaagccacggctaactacgtgccagcagccgcggtaatacgtaggtggcaagcgttgtccggaattattgggcgtaaagggctcgcaggcggtttcttaagtctgatgtgaaagcccccggctcaaccggggagggtcattggaaactggggaacttgagtgcagaagaggagagtggaattccacgtgtagcggtgaaatgcgtagagatgtggaggaacaccagtggcgaaggcgactctctggtctgtaactgacgctgaggagcgaaagcgtggggagcgaacaggattagataccctggtagtccacgccgtaaacgatgagtgctaagtgttagggggtttccgccccttagtgctgcagctaacgcattaagcactccgcctggggagtacggtcgcaagactgaaactcaaaggaattgacgggggcccgcacaagcggtggagcatgtggtttaattcgaagcaacgcgaagaaccttaccaggtcttgacatcctctgacaatcctagagataggacgtccccttcgggggcagagtgacaggtggtgcatggttgtcgtcagctcgtgtcgtgagatgttgggttaagtcccgcaacgagcgcaacccttgatcttagttgccagcattcagttgggcactctaaggtgactgccggtgacaaaccggaggaaggtggggatgacgtcaaatcatcatgccccttatgacctgggctacacacgtgctacaatggacagaacaaagggcagcgaaaccgcgaggttaagccaatcccacaaatctgttctcagttcggatcgcagtctgcaactcgactgcgtgaagctggaatcgctagtaatcgcggatcagcatgccgcggtgaatacgttcccgggccttgtacacaccgcccgtcacaccacgagagtttgtaacacccgaagtcggtgaggtaacctttatggagccagccgccgaaggtgggacagatgattggggtgaagtcgtaacaaggtagccgtatcggaaggtgcggctggatcacctcctttctaaggattttaacggaatataagaccttgggtcttataaacagaacgttccctgtcttgtttagttttgaaggatcattcgattcttcgagatgttgttctttgaaaactagataacagaagtaattcacattcaattagtaatgcaagatatcacgtagtgattctttttaacggttaagttagaaagggcgcacggtggatgccttggcactaggagccgatgaaggacgggacgaacaccgatatgcttcggggagctgtaagcaagctttgatccggagatttccgaatggggaaacccaccactcgtaatggagtggtatccatatctgaatacataggatatgagaaggcagacccggggaactgaaacatctaagtacccggaggaagagaaagcaaatgcgattccctgagtagcggcgagcgaaacgggaccagcccaaaccaagaggcttgcctcttggggttgtaggacactctgtacggagttacaaaggaacgaggtagatgaagaggtctggaaaggcccgccataggaggtaacagccctgtagtcaaaacttcgttctctcctgagtggatcctgagtacggcggaacacgtgaaattccgtcggaatccgggaggaccatctcccaaggctaaatactccctagtgaccgatagtgaaccagtaccgtgagggaaaggtgaaaagcaccccggaaggggagtgaaagagatcctgaaaccgtgtgcctacaagtagtcagagcccgttaacgggtgatggcgtgccttttgtagaatgaaccggcgagttacgatcccgtgcaaggttaagcagaagatgcggagccgcagcgaaagcgagtctgaatagggcgaattgagtacgtggtcgtagacccgaaaccaggtgatctacccatgtccagggtgaagttcaggtaacactgaatggaggcccgaacccacgcacgttgaaaagtgcggggatgaggtgtgggtaggggtgaaatgccaatcgaacctggagatagctggttctctccgaaatagctttagggctagcctcaaggtaagagtctcggaggtagagcactgattggactaggggcccctaccgggttaccgaattcagtcaaactccgaatgccgatgacttatccttgggagtcagactgcgagtgataagatccgtagtcgaaagggaaacagcccagaccgccagctaaggtcccaaagtatacgttaagtggaaaaggatgtggagttgcttagacaaccaggatgttggcttagaagcagccaccatttaaagagtgcgtaatagctcactggtcgagtgactctgcgccgaaaatgtaccggggctaaacgtatcaccgaagctgcggactgttcttcgaacagtggtaggagagcgttctaagggctgtgaagcaagaccggaaggacttgtggagcgcttagaagtgagaatgccggtatgagtagcgaaagaggggtgagaatcccctccaccgaatgcctaaggtttcctgaggaaggctcgtccgctcagggttagtcgggacctaagccgaggccgaaaggcgtaggcgatggataacaggttgatattcctgtaccacctcctcaccatttgagcaatggggggacgcaggaggatagggtaagcgcggtattggatatccgcgtccaagcagttaggctgggaaataggcaaatccgtttcccgtgaaggctgagctgtgatggcgagcgaattatagtagcgaagttcctgattccacactgccaagaaaagcctctagcgaggtgagaggtgcccgtaccgcaaaccgacacaggtaggcgaggagagaatcctaaggtgatcgagagaactctcgttaaggaactcggcaaaatgaccccgtaacttcgggagaaggggtgctctgttagggtgcaagcccgagagagccgcagtgaataggcccaggcgactgtttagcaaaaacacaggtctctgcgaagccgtaaggcgaagtataggggctgacgcctgcccggtgctggaaggttaagaggagcgcttagcgtaagcgaaggtgcgaattgaagccccagtaaacggcggccgtaactataacggtcctaaggtagcgaaattccttgtcgggtaagttccgacccgcacgaaaggcgcaacgatctgggcactgtctcaacgagagactcggtgaaattatagtacctgtgaagatgcaggttacccgcgacaggacggaaagaccccgtggagctttactgcagcctgatattgaatgttggtacagcttgtacaggataggtaggagccttggaaaccggagcgccagcttcggtggaggcatcggtgggatactaccctggctgtattgaccttctaacccgccgcccttatcgggcggggagacagtgtcaggtgggcagtttgactggggcggtcgcctcctaaaaggtaacggaggcgcccaaaggttccctcagaatggttggaaatcattcgcagagtgtaaaggcacaagggagcttgactgcgagacctacaagtcgagcagggacgaaagtcgggcttagtgatccggtggttccgcatggaagggccatcgctcaacggataaaagctaccccggggataacaggcttatctcccccaagagtccacatcgacggggaggtttggcacctcgatgtcggctcatcgcatcctggggctgtagtcggtcccaagggttgggctgttcgcccattaaagcggtacgcgagctgggttcagaacgtcgtgagacagttcggtccctatccgtcgcgggcgcaggaaatttgagaggagctgtccttagtacgagaggaccgggatggacgcaccgctggtgtaccagttgttctgccaagggcatcgctgggtagctatgtgcggacgggataagtgctgaaagcatctaagcatgaagcccccctcaagatgagatttcccattccgcaaggaagtaagatccctgaaagatgatcaggttgataggtctgaggtggaagtgtggcgacacatggagctgacagatactaatcgatcgaggacttaaccaatttgaatgtatgcttactgttatctagttttgagagaacactctcaatggtttggtggcgatagcgaagaggtcacacccgttcccatgccgaacacggaagttaagctcttcagcgccgatggtagtcgggggtttccccctgtgagagtaggacgccgccaagctttcttaacccagttcatgatgaactgggttttttatatgaaagatcacatagatatataaagctaatgcctttcaaaggcattagcttttttttttacattgattttgctttgctgttgtgatgttgaagattgtttgattttattgtttcgagcattcttaaactgaacacaatcagcagcataaggagcatcagtgcagtaaacagccagaacgcagtttgtgcgggatattcatctaagttccagccgacggcgatcggaaggagtgaacctcctaatccgtttgaagcgagcagaatactggtagttgtttctgtctttccaggataaaaatgattcgtgatgattagggctattgcaaacatgcctgccatgaacagccctaaaaagaagcaaaggacaaaaccgagccatatgtttttgcttaatgctaatacggtaagtgcagccagaccgccaatgcttatgagacggagataacggtgatatgtcagcttttctgataccgggcctgttaataacctaccgataatcatccccgtccaatacactgtaactgttatcgttgccaaagagttggggatatcccatttctcagcgaagatggaggggataaaatgtacaatggaaacttcactgccgccgtaaaagaagaagtaagcacccgccaaggcaataaacagcaatccgtgtgaccgataaccggtgctttcttttttagtgtcatcggaagagacctctttgcggatgagaagctgatcaatactgccgaaactcatctgcttccatgcgattaagagtgcaaaactggataaccctaatactaaaaaagcaattgtccacatgtggttgttgataagaaagcctgagagcagaggcatgaacagcgcacctaatccgtaggccacttccatcttgctcatggccacagcctgtctttctttaatagcggtgaggataatcgtgcctacacaggattccaccaatccggcgccaagccctgcgatgctgacgagaagaaagagcagcggccagggcggcaggaaggtgatgaacatttcacagctgatgagtgccaggccaaagataacgacgtttttgcgcccaagctttttcaccatgtaaggcattccgatgacaccgatgagaaagcccatgaactgagagaataccaatactccgccattactgtagctttgtgaataatgtgtgagtaactcaggcagtacggctcccagaataacaagtgtaaaagcaatcgatccataagaaaaacagcttatccacagcagacgagttttcatcattttatctccttattggtaaaatcatatttctctctactcgtatgacatgatgtttttacaaaaaatccaagtattgttactatatcacataactttttctcgtacatccattatggtaacgttaacaaattgttaacattttttacaagaaagaacgttgacattattttcaataatttatacgataaaaagcgaaattctaataatttcataggggtggtatttgtgggaacgaaggaaatcacgaatccagacagcttgtattacagtgttgacgatgtagtaatggagcgcggagaagggatttacctgtacgatcaagagggaaatgagtacattgattgcgcctctgccacgtttaacttgaatttgggatacggtaacaaagaggtcattgatacggttaaagaacaagccgataagctcatccatgtaacatcatcttttcaaacagacgccgtaaataaactggcagaaaaactagtagaaatcgcccccgataatctcacaaaagtacaccctaaagtcagcagcggttccggtgcaaatgaaggagctattaaaatggctcagtattactccggaaaaaccgatgtcatctccttatttcgaagccacctcggacaaacgtatatgacttccgctttgtccggcaactcattcagaaaagaacctttcccgccgcaaatttcttttggcctgcaagtccccgatccctattgcagccgctgtttttataatcagaaacctgattcatgcggtatgctgtgcgtagaaagaattaatgattttattgagtatgcgagcaatggaaaaattgccgccatgattattgaaccgatatccggaaacggtggaaacgtcgttccgcctaaagagtattttaaacagctgagaaagctttgtgatgaacatgatatcgctctgatttttgatgaaattcagaccgggttcggacggacgggtaaaatgtttgccgcggaccacttcgatgtgaaacctaatatgatgacggtagcaaaagggctcgggggcacaggctttcaagtcgccgccactctgacggaggacaagtataccgggcttccggggtatacgcactccttcacatacggctcaaatgtgatggccgccgctgccgcttgtaaaaccatagatatcatgcagcgtccgggatttttggaaaatgtaacgacggtcggtcattatattaaggatcgcttagaaacgatgaaagaggatttcgcttttatttctgaggtaagaggcgtcggtcttatgatcggtgtggagattgttaaagagaacaatgaaccggatgtggagctgaccaattatattgcaaaacgggcaatggattacgggctgattctccggacatcccgttacggattcggaaatgtatttaaaatccgtccgcctttaaccataacacttagtgaagccgaagtgctctgctacagacttcgcaagctattggaggaaatcaagtgagagactatatcattgagcttggacaatttgtttatcaaaaggtgaaaaatcaaaaaggcacgctgaaaaaccggctcgtaaacggctattctccgggaggcgacgcccaatttaacatagacgccgctgctgaggaggcggtgctggattatattcaagaaaagggccatccggttgctttttacacggaggatggcggcctgaagctgattggagaagatccgcaatatattttaattgtagatccgatagacggaacgcgcccggccgccgcggggcttgaaatgtcgtgtatttcgattgcgcttgcttcatataggccaaacgcaaagattaaggatatcgaatttgcttttttacttgaattgaaatcaggcgcttatatgtacggtgatatatacagcgatgccattcattttgaagggtatcatggagaattgccgaatttgagcgaagtgcgggatattaaaaatatgttttggagccttgaatttaacgggcatccggcgcagctgatgacggacgcatacggccatctgattgaccagtcggccaataatggcggggtttttgttttcaacagcgcttcttattcgatttcacgaattatcacggggcagatggatgcttatgtggatatcggcaatcgtctgctgaaagatgatccgaagctgctttcagattttcagcaggtcgggaacgggcaggtgctgcatttgtttccttatgatattgccgcaagcgtctttttggcgaagaaggcgggagtggtcattacggatgcgtacggccggtctttggacgaaacgcttctgacagatttaagttatcagaatcagcaatcatgtattgcggcatcaacgaaggagcttcatcaaacattgttagaccaaatccgctggggcagaaaggaagagaaatatgaaggcgttggtctggactcctaatgataagcttgaatatcaagaggtggacgagcctcaaattcggaaatccaatgatgtgaaagtgaaaattttcggcaccggtatctgcggaacggacttaaatgtgctgaaaggaaaaatgaatgcaacccatcatatgattatggggcatgaatcggtgggagcggtcgtggaaatcggaccggacgtgacaaatgtaaaagtcggagaccgcgtcgtgatagatcctacgcagttttgcgggaaatgtcattattgccggagagggctgacgtgttattgcgaaaccttcgaggattggcagctcggaatcggggcgcacggaacgtttgcggaatattacgtgggggaagacaggttcatgtacaaaattccggattcaatggaatgggagcgggccacattggttgagcctctctcctgtgtgctgaatgttgtggacaaggcttcgattcaaccggaggactcggtcttggttttggggtcgggaccgatcggactgcttgtgcaaatgatggtgaaaaaactggcgcgattgacggttgcgactgaaataggcagttttcgaagcgaggcggcaagccggatatctgattatgtctaccaccctgaagcattaaccgtggatgaagtgaaacggattaatcaaggaagaaaatttgatgtgatttttgacgcaatcggcaatcagcttgattgggcttatccttttattgaaaagggaggcagaatcgtgccgatgggctttgatgatacgtatgagatgacggtcaggccgtaccagctgctgtcaaacggcgtgacgattgtaggcacaggtgaagcccgccagatcatggaagccgcgttagcatgcgcgtccgaccttccgcagctctatgatcttattacggaaaagacggaactgaagaattatgaagaagccattgatcatctcatgggcatcgacccggtgacaaaagaaagaaaggatatcagcgcaataaaaacgattcttgtgtctgatccggaacttttataaaagcggaaacggctccagtgagggccgttttcttttcttatttatacggcttgcacatttctttaaagtttaatatgatactctttgttaacaattcctttcctcaacgacattatactctgagcgtgtcctctttttccccgtaagattgcctcatattccccagatgaaaatcaatgtttccaactgatagggtgcggatttttatagtgaaaaggagtcgttatcatttgaaagattatacgttacagcagcaatggttcgggaatgtccgtaaagacattctggccggtattctggttgccctcgctctgatccccgaggcgatcggattttcaattattgcaggtgtcgatccgatggtcggcctttatgcatcattttgtatcgcgattattatttctatcttcggcggcagaccgggaatgatatcagccgctacgggttcaatggcggttgtcatggtgacattggtggctgattacgggctgcagtatttgtttgcggcaaccattttgacaggtattattcaatttattcttggtgtcagtaagatagcgaaattgatgaaatttattccgcgttcggtcatgatcggatttgtgaatgctttggcgatcttgattttttctgcgcagctgccccagttcaaaggagcctcatgggtcatgtacgccatgcttgccggatcactggctatcatatatctattgccgaaggttacgacggctgtgccgtctccgctggtggcgattattgtcatgacgatcattgcggtggtcttccatgcggatgtccgcacggtcggtgatatgggcgggattacaagttcacttccgcatttcttgataccggatgttccgtggacgtttgagacattgcggattattttcccgtattctctggcgcttgctttcgtcggattgctcgagtcattgctgacagcccagatcattgatgaaatgacggatacggatagtgataagaacaaagaaagccgcggacaaggcatcgccaatattgtgaacggatttttcggaggcatggccggatgcgccatgatcggccagtctgtcattaatacgaaagccggcggacgcggccggttatcggcttttacggccggagcgtttttaatgtttttaattgccgtattaagcggtatcgtcgtgaaaattccgatggctgcgctggtggccgtgatggttatggtgtccatcggcacgttcgactggtcatcgattaaaggtttacggaaagcgccccttactgattcgatcgttatggttattaccgtcgtgacggtcgtcctgacaaatgatttatcaaagggtgtcttcgcgggtgtgctgctaagcgcgatcttttttacggcgaaaatttctaagctgaagattgtgtcacattccgaacagaaagatgtcagaacttataaggtaacgggacagatcttttttgcttccgtgtctgaactgatgaatgccatcgtttatgatgaaggcgtgaagcggattgtcattgatttgaccgatgcccacgtgtgggatgattcgggagcggcggctcttgagaaaattgtcgccaaatgtaaagaatacggaattgaggctgaattaaagggattaaatcagaaaagccgagatttaatgaaacaaatggcatagaatttgtgaagtccggatgaatatatccgggctttttttcggttaaatttgtgggtttgcattgttataatgaatgagatttgaaaaccgtatataggagacttgcatatgatgtggctacagaagttgaaccaagtgttggggagaatcatgccgcttttgactccgtcaagtgtggcggcgggtgtgctgttatctcagcatatcagctggatggccggcgctgtgccgtggatatttgcatttattacatttacgggcagtctgagtgccaattttcattcgctgaagcgcagtatcgagaagccgctcccgatgatcatggcattgtttgttctgcatattttcatgcctgtttttgcatggggaagcggccatctgattttcagcggtgaccctttaactgtgacggggctgattatgggtgtggtgattccgaccggaattacgagtttgatttgggctgcgatgtataaggggaatgtcggattgacgctgtctattatcctggttgataccgtgctttctccttttatcgtaccgttaagcctgtctgtcctggccggggcgaatgttcagatggatgtgtggggaatgatgaaagggctggcggagatggtggtgattccatccatcgcagggatgatagtcaaccagttttccccgccggtaaggactcaggcaataagccggtcgctgtctcctttttcaaaaatctgtctgatgattgtcattgccattaacagttcggaaatcgcgccgtatgtcacgcacgtggatatcaaatttgcgggcatcgcaggcatggtattttttattgccatgacgggttatgccgtggcatggctgatcggaaggctgatgaagcggagccaggatgaaattgtgtctctgatttatacggggggcatgcgcaatatcagcgccggagccgttctcgccgtttctttttttccgtctcaagtggcggttccggttgtcatcgggatgctttttcagcaaatccttgctgctttgttcggctatttgctgagacgctttgaacttaagccggtcgtgatgaagtatgaaaaaaaccgctcagctacgtgagcggttttttccgtacagccagcttagtgctgcattgaattgtcgtttgaatgcttcttgatggtgcacggcgccttcttcaacagtgaaagagagctgagattgagaaaagcctttttgcctcaggctttcatgcacgtctttattttgtcggatcatgttgttttggatgttgtttttatgctcagcttcgcggctgccgacagacatatagatacgcccccgtgccggacgcaaagatgcggagcggacataatctgctgatttttcataccagaaggaaccggaaatacaaccgattctgccgaatatttcaggcttttgcagcatcgcgtatatcgaaaacagtccgcctaatgacgcgccgatcaggcctcttgtttccggatgtgcagaaatgtgatgcatatcttctacagttggaatgatgacatttgtcagctcctcgagaaagagcctccctttgccgccgaaatcatgaaacgcagggctcagggaaggcgcgggccacggcgtgtactcatcgagcctgtcagccggtttgatgccgatgaaaatcaattcgggaagtgtaccgttcgcaaattgggattcaagtttatccatctgttctaaaaacaaagaacccccgtccagtacgtacacacagggtaaagcccctgtttgaaccgaataggagggaggaagatacacagtgcattcctttccgtttatccggtgttctgtaagggtgcctctcatgcatccagccccttcttttgcttaaacagaagaaaaaagaaataaggaacgccgagaatcgcaagaataattcccgccggcacttctgaaggctgaaagaacaatttgcccgcaaagtcggcggatatgacgaggagcataccgaccaatccgctgaccggtaatgagtatctgtgctcaatcccggcgagcctgcgggaaatatggggcgcgatcagtccgacaaatgccatgctgcccgctgcggttacacatgcgctgatcaaagcgatgcaggcaatgagtaaaatcgttttttctttattggttgaaacaccgaggcttttcaccgtgtcctcatcgaaacgaatggtatccagcaatgacgttttcgccataagcagaggaatgaacacgatcagccacggaaggatcgccgtaatggtcatccagtttgccgaccagatactgccgtttttccaaaccatcgccatctcataatcctgcgggtccatttttaatgaaagaaataaagacagcgcgctgaatccggaattcatggcgatcccgacgagaataattctgcccgattccagatgcccccggtgccaggcgaaaatatagatcagcacggccgccatcaatcctccgatgaggccgaagacaggcatacccatcgcagaggcaagtgccgtcgcttcagattgtccctgaaacagaagcataaacgtgacgattccggctccggctcctgcattaatgcccaaaataccgggatcggcaagaccgtttttggtaatggcctgaataacggctccggctatccccaatccgagcccgatggcagcagccatgacaatgcgcggcagcctcagctgaaacagcaaaatgtcatattgcggattcggatggatgcggaaaagcgtactgagcagttcacccggctttgcggaaaaagaaccgcttgtcatgctgaaatagcttacgagcaatatgagagcaatcagaatgatataaattccggccattttacgcaccacgctgatcccctccttttcttttaatcaaataaagaaagaaaggaacaccgatgatagaagtgacaacttcaataggcgtctcaaagggataattgatgaatcggctggcaaggtcgcaaagagtcaggaagacgccgccgatgatgcacgcgcatgggatcagcctgctgtagtccgatccgacgagaaaacgtgtgatgtgcggaacgaccaaaccgacaaaggcaatttttccggcgagtgccaccgagcttccggtcaatataacaacggccgccatcgccatgagtttgatggttcttttctgctgtcccagactttttgaaatgtcgtctcctaatgatacggcagtgacctttttgctgagaatcatggccgtgatgattccgatcgcaaaaaacgggacggccagtttcaaaaaatcagggttcatttgatgcagtctcgcactgtaccaaaaactgagatcctgcgaaatttgaaaataaatcgaaagcgcagccgacagactgctgagaagcatacttgtcaccgttccgatgatggcaagctgcaccggggtaaaaccgccgggaagaatggaggccagcccgaaaacaagagcggcgccgaatgcggaaccgataaacgagtatatgatcatttcaatggatgtcgattgagggagcaataccatgcaaagggtgatgataaaagcggagccgtccgacacacccatgatcgaaggcgaggccagatagttccgtgtgattccctgcatgagcgctccggaaacagcaagggctgcgccgataaacatagcgccggcagccctcgggattcttgaatgccatatgatctgatggtcggtattctccggattaaagtgcagcaatgcggagaacacggtatggatgtcaagctgctttgcgccgtataaaacggaaagcagcagtgacagaacaatggcaatcggtgaagcaatgataatcatgtgtgtccgccgttttgcatacatgtgaaaaacctactctttattagtcttgagtcaatttgtcagccgcaacctgtaagaagctgattttactccacgcggttccgccttgggctaatggatcaatcgtattgacgtatacatggtcttttttgactgccttcaggctcttccagatcggatttttctctaagtctttcaaagcgtccggcttatctgcgttttcgtcatcagagaattgtacgaagatatggtcagggttcatttcgcttaatttttcaagagaaatcagttcctgcgctttcgccgctttgacttcgtccggcgccttcaggcctaaatcaccgtaaagcgtggagttgaaatatacttgttcaggataaatataaatattgccttgtctgattctgatgaccagcgcgtttgactgtttcgctttgctgttgatctttgtttttgtctttttcaggtcctgttcgtaatctgcgatgatttttttcgcttttttctctttatctgtaagctgggcgagcagcatcatgttttctttccagtttgatgagatatgagagacagggatcgtttcagcggtgccgctcaattttttcaacgttttttccgggaatttggttgatgccagaatgacgtccggctgcagctcaagaattttttccatattcggctgcattttttctcccgtagatacggatttatctgtaatatctttaaacagttccgggaatttgccggagaaagaaattgcccctgccggatgaacgtcaagcaatttggcgtcttccattgattctacgctgcctgtaatggcgattttgtcagtcggcgctttgacttcatatgtttttccgagatattcgattttctttttatctgaagaagcgtcctttcctttacttgctgtatcagatgtttctgagcttccgcaagccgcggccgtgaaagccaaaagcaaaatcatgaaagcgaatgccaatttcttcatctattgttcctcctgttcaattgataactattatcaattggaattatagagaatgaacagggataagaccatggataatttccggcattaccatggacgatcttcggataaaatggaaatgctttgctcgatcatccgctgatgtccgcttggagaatattcaatccacgggtcagatgatatgggaaacacgcgtttattgctgactgctctaaggttctgccatatcccggtctgctgaatccgctgaaaataacgaagcgtttccggttctttacaagtgaaaagcatgatgcagtcagcctggcaatccgccagcatgtccaaggaaatcttttcgtcaggagcaaaagattccggttttgcggaggcaaagcctaaatcaccgaagaagacatcctcaatactgttgttatgggcgatgtacatattttctttatatacacggacaaataagaaccgctgatgccgcacgtgtttaagagcatctttcgctgaatgggcgagactttgataagctttaagccagtgccgcgcttcctgctcttcattcaaatatgcggcggtgcgaagaaactggtctctccaattctcttgagccggaaggtaaaaaacgtcagtgatgtcattcaggcgctgtttttcttcttcactgacagaatcaagactgaaaatgatgtccggggcagcttgggaaagtgtgtgcaggttctcttcccaatttgcattataacggtaagcactcaggtgaaccggaatatcggaagagaattgtttgtaataataggccgtccatttcgggtgcagcgccgcagcataaggcacgtgatgcagaggaatcagatgccccatcgtttcttttccgtacgcggccatttttgtgcgcctttttttcatatagcttgtaggtgagctgccggtatgttttttaaagatgcggctgaaataaaattcgtcttggtagccgatttgatgagcgatttcccgcagtttgcagtttgccttggccatcagttttttcgcattggttatgcggatgtctgtgatatattcagttacgctctgcccgtatagttttttaaaggtttcactgtaatgcttgggactgattcccgccatatgagcgagctgggtgagcgtgatttttgtgtcggactgagcatgtatgaattgttttgtctgttcgatcgccgctttcgtattattttgatggcatacttttgcagcataaaggtcatacatcagctgctgaaagtcggctgtatatttcattttctgcaatgcatccgccgatcgcacgttttcagaaagtgactgaagccggcttgtcaaatgatcaaccgtttgtaaattcatttgctgaagtccgtggaagatgtcttccccgttatccggaagcatcgcttcatcatctgatgaataggagaaaacacggagtctgacgatatacaaatggatgccgcctgacggtataggggcaatattgaatgtctcatcaccaggacagatgtagagcgtttccttctgcagcggaaagctgtctgttccgatatcaatttgtccctcgcctttcacatgaaagatcaatacgggggaatcagtgagctgatgctctgacagaaggtcggctgttttttttacggagatgatatcaatgggctgaaagaataatgtgtttttcatgagaaaccaccttttaggaaacattcatttaaatgataactgttatcatttaaattgtaccaaataaatgaatgttttcctataaaaagcggaaatgtgaaatgcgtcaaaatgttacacgtgtaacacgaatgttgtcagtatatgaggtattgttttcttatagttttgaattggtccagccggcgttgatatgtgctggtgatgtcttcaatggaagcgcctttttctatttttttgcgtacccagccgttaccgatcagcttgtcaaaagagcctgtcggcaagaatgaaaagtcattcggatataagtcatgcatggttttcagaatggaaagccctgtttttgccgcttcaaatgtatttctgtttgttacgtagacttgtacgccgtggcacagtttgccctggtgcttggagaagctggggataaatgctgcggctctgaaggtgacgcccggaagcttgagactgttcaggcgttcttcgagctcggtgtttttcatataaggcgcgccgatcagttcaaacggctttgtcgtgccccttccttcggatacgtttgtgccttcgattagtcctgtcgccgaatatgcgaatatgctgtccggggtcgggatattaggcgaagggaggacgaacggcagaccggtatcttcaatcgtcatcgtccgcttccagcgcttcatttttacgacggttaggtcggcgccaatatgaaactctttattgaataaaagagcaagctcaccgatcgtcatgccgtgcttcagcgggatcggatacagtccgacaaatgaagcgtaatccggttcaagaaccgggccgtccggatttcgtccgccttgcggattcggccggtccaatacataaaaaggaatgcctttttctttggccgcttccatggcataggccattgtataaatgtaggtgtagtatcgcgttccgacatcctgaatatcgaaaatcagcacatctgtatctttcagcatgtcaggcgtcggtttcctcgtttccccgtacaggctgtagacgggaagccctgttttttcgtctatatacgatgtgactttgtctccggcctgagcatcgccgcggacaccgtgctccggtccgaataatgccgtcaagtggatgtctggtgcctcatacagcacgtcaacgctgcttttcaatgaattgttcacaccggtcgggttggtgatcagcccgaccctttttcccttcagttcctgtttataatctttcagcaggcggtcgatgcctgtttggatgcttggtttcttggcggtatgaaggtttctgtcagaagccgccgagactgccgtcatagcactgatgacgactaatccggcaagaagcgcagccgtttgtgttttcatgatcagtcctcctgtttaaagcggttttccggtcttcagattgataccgaaaccataaggatacagtgtcgttcccggatgcgtgacggaaggaatgtcagcgggcagcctgccttgcggtgttgtctgtccgaatatcgcttcaacgcctgccggaatgtttggctggagaaattgtccgtctgtatatcctttaaagccgtagactgcgataagggcttcagcttcttcaaagttcgcggcgtcatatggattacgcaggctcatcagcacaaagggtttttggttcgattgtgcggctttcatgactgcccgcggaaatgcagtcgtccacttgccgggatctgtgacggaatcgtcaatcacgccgtcgtttacgacaggatcatttttcacaacatatgagcctgtaatcacgtaatcagcgtcagttatctgctttttgtgttcatcatgaaatgtgcgctcggcgaagttcattttactgatggttaccggccggatttttttcttcttgatgagctgccgaatggtttgttccattgacgctgtttgatcttcatatggagcggcaatgagaacgcggctgttctttttcggtttgaatgggagcgtgcggtttttgttttgtaagacggtgacggacctttccgcgatttgtttttcagctttcaggtgatttttgctgccgacggttttctttgcttttgcaatcttctttttcagatttgtctctttcggtgcgggatatatccctcgttttattttcagggaaatgatgcgttccgccgatttgttaatttgctgcagcggaatatcccctttttgtaccgccttttttaatgcggaatgaacccgggcaaagcggttttctgtttgcagcgatgtcacttgggccggcatcagggcaatatcgactcctgcttttacggccatgacgaccgcctcttcctggccgaaatgatcggcaatggctttcatatttaatgcatccgtgacgatgacgccgttaaagcccatttcctcacggagaagatgagtcatcacttttttcgagagcgtggcgggtacgaggatgtctgaaccgtccagcttgcttttataggttgtatcgtcaaacgcgggaaattgcacatgggctgtcatgatcatatcagctccggcctgaatggccttccggaacggataaagttcaatctgacgcagcctttcttgattgtgggtgacaagcggaaggccgtagtggctgtcgacatccgtgtcgccgtgtcccgggaaatgtttgacggcggcagcgacatcctgcttttgctgagccttcattgaggcaagaccgagtgaagctgtcagatctcggtctgaactgaaggacctgacgccgatgacaggatttccgggattattattgatatcgagaacgggagcgaagttcgtattaatgcccagtgctttcagttctttcccgataatggcgccggtctgggacgcgtaggctgtttttctagcggctccgagcgccatattgcctgggaaatgagtgccctcaccaagtctagttacgatgccgccctcctgatcaatgcttaataatagcggaatgtcagggctcgccttttgaaaggcatctgtcaggcgtaccgtttgttcagtgttttttacattttctgaaaataaaataacgccgccgaaccggtacttttgaataagccctgcgacttctttattcatttgggtaagagcctcaggtgatgactgcccctttttttgccaattgcgaaaatcaggcatgagcatctgccctaatttttcatctaatgtcatacgggataccgcttgttccgcctgtgacggaatgtccggttttgtcgatacatgatgcgtgccgaaaacaatgaacaacagtaatacagctgagataacaagtttcatgatggtgccctcctgccgtcatagtttggacaaaagacatgggttgtcattcaatggcttcataaatcgtttttatgatgctgccgtagcttccggtcggaaaaagatccccttcaaaaacattcgggttttcaccgggactgacgacgggggaatgctttttattggtcaaaagtgcgatccccagcttataagcgggatcaataatcgtgacggtgccggtccatcccgtatggccatatgcctgcctgcttgcataagggccgaacatccactccatatccgggctgccgtttttccgccagccgagagcgaaagtcggatcagaggatgccgccgtggtgaacaaatcggccgttcttttattgaagagagaaacgtgtttataactgcctccgttcagcatgacttgaagaaggacggccatgtcatcagctctggaaaacagcccggcgtgaccggacacccctcccattgagtaaaatgctttttcatcgtgaacttccccctgcagcgtatacgtcctgatgtgagggaaacggatgactccgtcacgtgtgttgcctaaacgttcagtagctgcgaatgatttttctttaaagcctttttgcagcggattgaacagtgtgtgcgtcagtttcagcggtttgtacagttcttgttccgcataggcatcaagggtttttccggttatgttttcaatgatgcagccgagaagcatgtaaccgatatcgctgtatacgtgttttgttcccggtttgtatgcaagcgggatttgggtgagaaaacggatcgttttatcccgttcttgtgaatacaaagggcctgcggtgtccggctgatagaaataaaagcttgccggcagaccggattgatgctggagcacatcgatgacgcgaatgcggtctttctcttgaatcggatcgctttttctgtctttgaaatcaggaaggtaagccgagactttttgatacacatcaagctttccctggctgacgagtcgctgtaatgcaaaattcgccgcgtacatttttgtattggaagctagatcaaacatggttgatgttttcatttttttcggacgggataaaagggtgttcccgtcatattttttgctgtagccgtatgctttctttttgatcacccgtccgtcctttacgacgacgaggacggctccggggaatcctgctgcaatgtctttttcaatcatttgatcaacctttctgagctttgctgcgtcgtataatttggattgggcttcggctttgtgctgcggcagaaaagagaggctgatgaccattgtgagtatggcggctgtcagtgttttcatattcagatccctcccggtttattcaaattcagcagccatgtcatccttaaatccgaacgcataagtgaagacaaagcccgccgcgtaagagatgaagagaccgatgatatacaaaacgatttgagccggctgtacgagaaacgagagcggaaggccggagacaccgattgaaaaagtagccacctgaaaatgggcttgaaaggcgccgccgattcccgcccctaaacacgccgtcaaaaacggccggccgagcgggagcgtgacgccgaagatgagcggctctccgattccgagcagaccggatggaagtcctccgccgatcgctcttttcaatgaggctttttttgttttcataaagatggcgaacgccgcccctacctgacccgcgcctcccatcgcgagaatcggaagaagcgggtcatctccgattgatcggattaactccaaatgtacgggagtcaagccctgatgcaggccggtgacgacaagcggcaggaaggcagctcccagtacaaaccctgagagcactcccccgacattcagcagcgacaataaacctgatgtaatcagatcagaaataaaaccgcctgcagggataaaaacgacatatgtcaccagcccggtgataagtaaagacaatgtaggcgtgacgataatgtcgatggattgatggacgtactttctgataaaccgttcggtataagcgataaaaaccgcagcgaaaagaacgccgattaatcctcccctgccagggagcagattctctccgaataaactaatattggcgatctcagggttaaggatcaatatgcccgcaaggccgcccatcgcgggtgtaccgccgaattccttcgccgcattgatgccgacaaggacgccgaggtatgcgaataagcctgaaccgataaccgttaaaataagtgcgatttgggattctttcgggagccagccggcctgaatgacggctttcgtaataccggtgattaaacctgatgcaatgagtgcgggaataagggggatgaagatgcttgatatttttctcagaaacagtctgatgggtgtggtgttttttctgttgagatcggcttttttccgtgaggcggcttcttttaaatcaatgttttttccggatgacataagttttgcgaaagcgtcggcgacatgattgacgacacccgtgccgagaatgatctgcagtgtttcggcttcgacgacgcctattaccccgtcaagccgtttcagcgcctcaatatccgttttgtcccgatctaaaggtgtaatcctcaggcgtgtcatacagtgggtaaagcctgaaatattcgatgaaccgccgcaattgtccaggatatctttggccagtgactgataaaatgcctctttgctcatggagatcctcctttgtccgtatgatttttcccggagagctgtgcctgaaacgcgtcctaaaagcgcctgcgccgatcatgaaaacggcgcgggctcataaaagcacattatttttcaccaaagaacgatcagcgttctttttcttttgaaacgtgctgttcaatggctttgtcaatgaagccgtctgcttctttgagcagtgccttcgcgtgtgtttcgtctgaattcgtcttcagcatgacgattgccgttttgacatggctgcctgcggcctcaagcgtttcttttgccttgtcgtacggaacgcccgtgatgctttgaataatgccgattgcgcgttctttcaatttttcgttgctgacatgaacgtccaccattaaattttcgtacactttgccgcttttgatcatcacggccgtggaaatcatgttcagaatcattttatgtgccgtcgccgctttcattcgtgttgaccctgtaatcacttcggggccgacgacgacttcaatgctgtgatcggcataagtgctgatcaatgagtgtttattgcatgtgagcgcgacggttttggcgccgattgtttttgcgtatttcagcgcaccggccgcatacggcgtgcgcccgcttgccgcgatggcgatcacggtgtcttctgcggtaagcccgatcgttttgagatcgagagcgcccgtttcctcgctgtcttctataccttcagccgcttgcaaaaaggcgtctgctcctccggccatcagaccgatgacggtgtcgggacttacgctgtatgtaggcgggcattcaaccgcatccagtacaccgagtctgccgcttgtgcccgctcccgcataaatcagcctgccgtttcgccgtaatgattgatgggcgaattgaacggcaatctgaatatcgggcagcacctgctgaacggcttcagccactttgaaatcctcttcgttaatgatgcggagaatttccatcgtgtctgcttgatggattgaagcggtctgcggatttctggtttctgtggtcaatctgtgaatgttaagccggtctgtcatgattgtaccctcccaagtcgttaatacttgaagtatatgggcttctgaatatatgtttcaagaaaaatcggcagggatgagatgaataatcaagcgctttcacaaaaaatgatgcagaatgtgctgttcaccgatggggccgatcctgcgacgacctttatcaataaaaccggaagaccggtacaggttctttgcacgatgattgcgatggtttacagcaagcacgatttcatcacaccaaggaaagtaatttgcgacaaaagcggggagctgcagcatcgcttgtttggcataaccttttccctgatgcggcgcatgtaaggacagcgcactcagcaaaatggcagacacattgttcgaatacggggcaatggtttcttttgaggtatgtaaaataaaaaaaccgacggggcggtcttcttttaaaatgactgtcgggtagcgatcccggatgacaagagcctgcggcaggacatccttcgggagagctgtgaactttttatcttcttcactcagcacaaacccgttcagtccgtctgcatgctccggtttataaaaggacagggctacatccatgatatctactctccttttttataattgatccaattcatcttctgatagaacacggcagcctgcccgttttaaaagagcggaagtgatgccgtctccgattatttttttccctgagaaagtgccgtcatagataaagctgctgccgcaggacggactgttttctttaaggatgaccgttgcggcgcctatttcttttgcgtatgctaatgttttttccgcgccgtccatatataaagccgtaacgtcttcgcctgatgccgttacgattcttgctgttccgttcagcacgtcttcgcccgtgccgccgatgatttccgccggttcgcggggagtggtgaagccgcccaaaagttcggggcagaccataacagctttcttttcttctacgagtctgcggattttttccgaagcggcgtgagagccgttatacctgcattcgataccgccgagacaagagctgactaagatcatctgtgtccattcccttcaatattttgatactttcatcataaatgaaataagagaggagggatgagtttttcagttaaaaaacgggtaaaaaagtttgaaaataaaaaaaataattttcctctttacaaatggggtacaacctgtatataataacttttgtcagctcgacgcggacacaacggcccgttggtcaagcggttaagacaccgccctttcacggcggtaacacgggttcgaatcccgtacgggtcatatggaggattagctcagctgggagagcatctgccttacaagcagagggtcggcggttcgagcccgtcatcctccaccatatttgccggcctagctcaattggtagagcaactgacttgtaatcagtaggttgggggttcaagtcctctggccggcactgtttttcaaaaaaatacggaggggtagcgaagtggctaaacgcggcggactgtaaatccgctccctcagggttcggcagttcgaatctgcccccctccaccatttttgggctatagccaagcggtaaggcaacggactttgactccgtcatgcgttggttcgaatccagctagcccagtctcagacaccttttgcataaaggtgtcttttttttatcagcattttgtttcgatttctgattgttcatcagatatactatttttaagctgctgttaaggcagtatattctgtattttccatctacaccctgcctgaaatttggtaaaataaatgtaataaaaaaaatgaaaccttttaaaacaatcaacgtatagatacagaccggtgaagggcagaggtaagataaaacatggaaaacctgattaaaaaaagaatcaagcaagtcaaaaaaggcgatcaaaatgcgtttgcagaaatcgttgacctttataaagataagatttaccagctttgctaccgcatgctcggcaatgttcacgaagcggaagatattgcgcaggaagcttttatcagagcgtatgtcaatatcgacagtttcgatatcaacagaaagttttcaacgtggctttacagaattgcgaccaacctgaccattgaccgcatccgcaagaaaaagcctgattactatctggacgcagaagtagcgggagcagaagggctgacgatgtattcgcagatcgccgcggacggggttctccctgaagacgccgtattgtcattggagctgtcggacacaattcagaaaaagattttaaagctgcctgacaagtacagaacggttattgtattaaagtatattgacgaactctctttaattgaaatcggggagattctgaatatccctgtcggcaccgtcaagacaaggatacacagaggcagagaggctcttagaaaacaattaagggatctttaagtggggtgatgaaatgagctgtcctgaacagattgtgcagcttatgcataagcatcttgatggagatatccttcctgaagatgaaaacgtattaaaacaacatttgcagtcatgcgggaattgcaaacggcattttcatgaaatggagaaatccgtagcactcgtccgaagcacatcgcatgtcacggcccctgctgattttactgccaaagttatggcgaatcttccaaaagagaaaaaacgcgcttctgtaaaacgatggatcaaaactcatccgatgattgcagccgcagcagtttttgtgattttaatgggcggcggttttttcaacagctggcataatgaccacaatttcagtgtgtccaaacagccgaaccttgtcgtgcagaatcacacggtcaccgtccctgaaggcgagaccgtaaagggcgatgtcacagtaaaaaacggcaagctgttcattgaaggaaaagtcgacggcaatgtgaccgtcgtcaacggagaaaaatacatggcctcagccggacaagtcaccgggcagattgaagagattaaccaattgtttgactgggtctggtacgaactgaaatcggcgggccagggcgtcgtgagcgctttggacccgagtgaagatgagtaaagcgtataatcgctttactctttttttgtgcatcgccgctctggctcatttcacttgagaaatcaaaatgtggtataatgagcacgctatatgatgtacatattgctcatgcagcacaattcataacagaaaaacgaaatgactgaattcttggaggacgaggaaatggcttttgaggacatcccatttttgcaatacctcggcaatgccgttgatattctccttgtttggtatgtgatatataaattaatcatggtcatacgcgggacgaaggcggttcagcttttaaaaggaatcgtcgtcatcgtattggttcggatggccagttcatatttgggactcagcacgcttcagtggctgatggaccaagcgataacatggggatttttagcgatcatcattatattccagcctgagctgagacgggcgcttgaacagctcggacggggccggttcttttccaggagcggaacccccgtggaggaagcgcagcataagacaattgaagcgattacaaaatcgatcagctacatggcgaaacgccgcatcggcgcactcatcgccattgagcgcgatacgggaatgggcgattatattgagacgggcatcccgcttaatgcgcaggtcagctcggagcttttgattaatatcttcatcccgaatacaccgctgcatgatggagcggtcattatgaaaaataacgagattgcggcggctgcctgttatctgccgctttctgaaagcccgtttatttcaaaggagctggggacgcgtcacagagcggctgtcggcatcagtgaagtgacggacagcttaaccattattgtatctgaagagacgggcgccatcagtgtggccaaaaacggagaccttcacagagaattgacggaagaagcactgaaagaaatgcttgaagccgagtttaagaaaaacgccagagatacttcttctaaccgctggtactggaggggcaagaaaaatggataaattcttaaacaaccgctgggctgtaaagattattgcattgctctttgcgctgctgctttacgttgcggttaacaacaaccaggcgccgactccgaaaaagccgggggaatccttttttccgacatcaacgactgacgaggctacgcttactgatattcctgtaaaagcatactatgatgaagcgaactatgtcgtcaccggcgtgccccagaccgtaaatgtcacgattaaaggctcgacaagcgcggtgaaaaaggcgagacagacgaagaattttgagatatacgccgatatgaataagctgaagaccgggactcataaggtcgaattgaaggcgaaaaacgtatcggacggactgacgatctccattaacccgtcagtcacgacggttacgatccaggaaaaaacggccgagagttttcccgtggaagttgaatactacaataaaagcaaaatgaaaaagggatatacccctcagcagccgattatcagcccgaaaaacgtgcagattacaggttcgaaaaatgtgattgataacatttcacttgtcaaagcatccgtgaacctagaaaatgcaaatgagaccattgaaaaggaagtgaaggtgaccgtctatgacaaagacggcaacgcacttcctgttgatgttgaaccgtcagtcattaaagtgacggttcccgtagccagtccgagcaaaaagcttcctttcaaaatcgaaaggaagggaagtcttccggacggggtgagcgttgcgagcattgactcgaatccgagtgaggtgacggtttacggcccgcaggatgtgctggattcacttgaatttattgacggcgtatctcttgatttaggcaaaattgataaagataccgatatcaatgccgatatcccgcttcctaagggcgtcactaaggtatcaccggaaaaaatcacgcttcatgttacagtggacagtgaagacaaaaaggattttgacaatgtcggaatcaagacggtcggactgggaggctcacagcagattgagtttctcgatcctgaatcgcaggcgataaatattacggccaaaggctctcccgccaacattaaggcgctgaaaaagtcggacattgaactgtatgccaatgtctcggacttggatgacggagagcactctgtaaagcttgaagtaaacggcccgcaaaacgtcacatggtccctgtcaaaagacacggttaagatcaagctgacttctaagaaaaactcaagttcaaataaaaataacggcggttccgctgattccggcaataagaacggcacaagcggagacgcagacaaagacaagaacaagaaccgggaagacgacactgacagcgatcagaataaaagtcaaaaccaggatcaaaatcaagaccaggatgaagacggatcaagcgctgattcttcttcaacagaatgaaaaaggagcgatacaaaatgggcaagtattttggaacagatggtgtaagaggtgttgccaacagcgagcttacgccagagctggcctttaaagttgggcgttttggcggttatgtcctgaccaaagataagcagcgcccgaaagtgctgatcggccgtgatacacgtatctccggacatatgctggagggagcccttgtcgccggacttttatcgatcggagctgaagtgatgcgcctcggcgttatttctacgccgggggtatcctatttaacgaaagccatggatgctgaggcgggcgtcatgatctccgcttctcacaaccccgtacaggataacggaattaaatttttcggaggggacggctttaagctttctgatgagcaggaagccgagattgaacgtctcatggatgaaccggaagataagctgccgagaccgacaggcgcggacctcgggcttgtaaacgattattttgaaggcgttcaaaagtatctgcaatttttaaagcagacggcggacgaagatttcacaggcattcatgtagcgcttgactgcgcccatggtgcgacatcatccattgcgacgcacctttttgccgatctcgatgctgacgtatctacaatggggacgtctccgaacggattaaatattaatgatggcgtcgggtctacacacccggaagcgctgagtgctttcgtcaaagaaaaaaacgccgatatcggccttgcgtttgacggagacggcgaccgcctcattgccgttgatgaaaaaggaaacatcgtcgacggtgatcagattatgtacatatgcgcgaagtatttgaaatcagagggccgtctgaaggatgataccgtcgtatcgactgtgatgagcaacctcggtttctacaaagcgcttgaaaaagaagaaatcaaaagcgttcaaacggcagtcggcgaccgctatgtcgtagaagcgatgaaaaaagacggctataatgtcggcggcgagcagtcagggcaccttattttccttgattacaacactaccggcgacggtcttttgtccgcgatcatgcttgtgaatacgctgaaggcgtccggcaaaaccctttcagaacttgcggatgaaatgaaaaaattcccgcagctcttagtgaacgtgaaagtgacggataaatataaggtagaagaaaacgctaaggtgaaggccgttatttctgaagtggaaaaagaaatgaacggagacggccggattttagtgcgcccgtcaggcaccgaaccgctcgtccgcgtgatggctgaagcgagaacaaaagagctttgtgacgaatatgtcacaaaaatcgtggatgtcgtgcggacagaaatgggagcggagtagcgaagtttataagcagagagcgaacaagacaagtgcgatcagcataatatgatagtaaacatgatgccggggcggcaaaaaataattgaccgtccttggcacatgctgtaaaatcaagcttgttcagcctttgtttttcacttgcaggaaaggcgggattgtttgcatcttttataattacagcgcccgaactaagcgcccgaaaaacggcttagttgacgaggatggaggttatcgaattttcggcggatgcctcccggctgattcatttagatcacagccgtaaggatttcttcaaaccggaggggcgactctccgaacaaagagaaatcacatgatcttccaaaaaaacatgtgggaggggacgattgaaagtccccttgtaatttgactttcttcgtctcctgttgcacctttaggaggaagaaaatatgtgtggaattgtaggttacatcggtcagcttgatgcgaaagagattttgttaaaaggattagagaagcttgagtaccgcggttatgactctgccggtatcgctgtggcgaatgagcagggcgtgcatgtgtacaaagaaaaaggccgcatcgccgaccttcgtgaagtggtagatcactcggttgaatctcaagcgggaatcggccatacacgctgggcgactcacggcgaaccaagcttcctgaacgctcacccgcatcaaagcgcactcggccgctttacacttgttcacaacggtgtgatcgagaactatgttcagctgaagcgcgaatatcttgaaaacgttgaactgaaaagcgacacggacactgaagtagtcgttcaaatgatcgagcaatttgtggcgggaggacttaacacagaagaagcgttccgcaaaacactgactctgttaaaaggctcttacgcaattgcattatttgacggtgaaaacacagacaccatttacgttgcaaaaaacaaaagccctctgttaatcggccttggagatacgtttaatgtcgtggcgtctgacgcgatggctatgcttcaagtaacgaatgaatacgttgagcttttggacaaagaaatggtgatcgtgacaaaagacgaagccgtgattaaaaaccttgacggtgaagtcatgacacgtgcgtcttatatcgctgagcttgatgccagtgatatcgaaaaaggcacataccctcactacatgttaaaagaaacggatgagcagccgcttgttatgcgcaaaatcatccaaacgtatcaggacgaaaatggcagactggccgtggccggcgatgtcgctgacgctgtggcggaagcggaccgcatttatatcgtggcttgcggaacgagctaccatgccggtcttgtcgggaaacaatatattgaaatgtgggcaaacgtaccggttgaagtgcatgtagcgagtgaattctcttataacatgccgcttctgtctaagaagccgctctttatcttcctttctcaaagcggagaaacagcggacagccgcgccgtgcttgttcaagtcaaagcgctgggtcacaaagcgctgacgatcacaaacgttccgggatcaacgctttcccgtgaagcggattacacattgcttctgcacgcaggccctgagatcgcggtggcatcaacaaaagcgtatacggctcagattgccgtgcttgcgatccttgcgtccgttgcagcagaacgcaacggtgttgatatcggttttgatttagtcaaagaattaggtatcgcggcaaacgccatggaagccctctgcgaccagaaggacgaaatggaaatgatcgcgcgtgagtacctgactgtttcaagaaacgctttcttcatcggccgcggcctcgactacttcgtatgtgtcgaaggcgccctgaagctgaaagagatttcttacatccaggcggaaggcttcgccggcggcgagctgaagcatggaacaatcgctctgattgaagaaggaacaccagtctttgcgctggcgacacaagagcacgtcaacctgagcatccgcggaaacgtgaaggaagtcgcagcccgcggcgccaacacttgcatcatctcgctgaaaggcttagaagacgcagacgacagattcatcctgccggaagtcaaccctgcgcttgctccgctggtttctgttgtgccattgcagctgatcgcttactatgcggcactgcaccgcggctgtgatgttgataaaccgcgcaaccttgcgaagagtgttacggtggaataatatatttaacccctttggttattagccagaggggttttttaatgcggaaatgagaaatacatactctttgcgattgtaaagaaatccccttttatatattgaaaaggattaacacctgctttataatacgagatgcattccggttaaaatccataaatgtaatcattagtaaattatttttgtgcatgcctcatcagaaagtaatcacctccagcaattttcatcatgaatttccattatataaacgtaatcaatcgattgcacatccgtattatgattaataaagactttaaaatcccttttgtatttgccgactcctgatccattatgaatacctcgactggatatgaaaataacaacatttttgcaataatccggttcaattcttaaaaaagtcctgacaacaatgataggagtggaatgatgtcaaaccttttagaaatcagaaacatcagcaaatcttttggccataaagctgttttaaaggatgttacattcaatgtgcctgccggatcaattgtcggttttatcggtgataacggcgcaggcaagtcaacaacatttaaaacgatattaggattaatctctcaggatagaggtaaagtgaaaatctttggtaaagagaatctggataaacatataaagttcaaagaagatattggggtcgtatttgatgcgatgaatcttcctgcgcaccttacgataaagcagctgaatcatgtatttaagaaactattcggtgcttgggaccaagatcatttttaccggttggttcattctttctctttgcctatggacaaaaaagtgaatacattctcgcgcggcatgtcaatgaagttatccgtagctgttgctttgtcgcataatgcaaaattattactcctggatgaagcaacgggagggcttgatccctcttcaagagatgatctgttaaatgaattaaaaagctttgtggataaaagcaacggcggtattttactttcatcgcacattatgactgatgtcgagaagatagccagccatatcgttattatgaaagatggagaaattttattaaatgaagagaaagataaggttcttgaaagctatactgttatagacgttgatgaaggccaattggctgagcttgacgaagatatcgttctagcaaaaaggaaacatggatcttattggagtgtgcttgtatcggatcaacagaaattgccgaatggcgtaacggccaacaccatttccatagaagaaatcagcgtctttttaacgaggagtgaaaacattgagaggtctgttactgactaactattacctggtttatcgaagtttctttgcatacacggggttggccatattggtatcagcagtcattttttattttggggatgcttcaatgcatcgttttgttgctatgctgattattttgtttgtcgtcatgcccgcacttgaggttataaagtatgagagcaagtctggctatgacaggtatgtcctgactttaccggtcagcagaacaaatattgttcaaagccactatttcttttatcttttgattgttgtgatcggagccgtactatcttatggtgttttctttgtatacagcctgggatctgatgaaccgattgacagcatatttaatattgtctcttttggaacgttcatcgttctctttgccggtgcaatcgtttatcctcttctctacatgataggcccggaaaaatccgatgctatcgtgattggaggtgcaatggggggactttttgctacctttggattgcaaagtgtcgttgggtatgcagcagaacaagtaccgctgtcatttttgcacataaatccttctttatatgttccgattatatatctcatgatcggcgttatcttatatatcatttcatttttcattgccacagctatatatcataaaaaagaattttagcaactgatcaagctataacaggataagacatggcacgggctcataaattcactttaactccaagcagacagccgcccgcccaatgggcggctgttcttctaattaaaactgcgttgtcacatcgtactcataatcaatcttcaatttcacatttttcatagtcgattttgctgttgcgagtgtgttgtatttaaaattccagatgcttgagactgagaggttatcatccagtgtgataccgtaatttccttgagtggagctgtttgcaagtgcacggtgccacactttattttcttccgacattatgtagtggcttgtatttccttggcttggtgtttgggttgcggtggtgttgattcttttcactgtggcgtctcttggaatgcttgtctgtttggttaagtcgagtctaagaacagttgaatctgatccattcggactgaggcttgtgttccctttattttcagctgtaccgctgaatgagaaggtctcactgccggatttgattcggtcgtaaatagagagtgtaaagtacatatcgtcagtgtaggagccgcgggacactttcacgtagaacgtctcgttattttctttcgcatctgtattcgcatagataaaaggtagcgccgtatcaggatttatcacttctgtgcctttactgatcagtactttatttttattataaatttcaatgtccattcccttgtattcacttcttgttgaactcctgacataaagtctttctcccttatttgccgtgaaagtgaaatacgaatctttttccccttttggcaatatggcagtatcaatatttttatatttccagtagcctaccggattggcagtttcaaatgaatgatttcctgtaatggcgcttatttgtaacgagttcttttgagacgcagaggctgaaggtgaagatgcaaacaatgcgcctgataaaacgatgacactgacaaatagaatcaatatacacttcttcatggaaaaacccccctttttgactacatcatacataaaaacattagctatgtaaacatttgttatttaaggttaaaatcaactgggaaacagccgatacaaacactagaacatcatctcaagcggaggttaaaaacatgcgcctaaacgctcgatatataaaaaatcaagtaatggctcagcaagtgcttcagcggtattcttccaaaacaaatgtgaaagatgcggcaaaaggatcggacagcttattgattcagacaggcgggagccgcgatctgagccaggtgaattattcaaggagcggtgtcactgagaaagggagcagcctgtcccgtttatatcaatctgcaaatcagaaaacgattacggataatgggaatgagacggtaatagacgctaataatccgtatgagtctgagagtgatattgcgagcaagattcttgatgagaaatacagccgtatcaatgaaatcaataaacgaaaaccagatcctttgcattatattaaggacaaataccagcgtgccgattcaccttatttcagaagtgatttatcagaatcggagcgtcaggccgcttatcataatgaaacggaatggctgtttaaggggaaagcccagagctatgatttccgtgatgcggcgtttcggggtgaaacgctcaacggagagattcaagtcgaaaatgaaaaggtgtttcagcgcgggcaggtgaatcagcagattgagatgcttttccatcggaatcatattcagattccggagggtgcgaatcttacatttacgatatcaccgattgattatctgttaaaagtgagcgggactgacgataaagagctcactcagcagattgaagctgtcttaaactccggggaaaacagcaaagagctgtttgcgcacatcattcgcagccggagtgatgactcctcgcagtttacgccggaaacatatgagaaatatcaagtcgttcgggaaatgtacgaggtgaccggctatcatctgaaagacttgcagatcgtggacggaaagtacgtcacagaagacggacgcgaccttttagacgtctataaggaagcgctgcagcaagatcctttgttgagacatacggcggcagaagcggccgcccattacggacaggggctcacgaagcttgcgagaacgggttatgacgccattcctgatttggttctgtccattgagtataaaaacggatctctgcgtgatgtcggccaaagcaggcaatacggatctggggatacagattggctttctgaatggaaacgggagctgggtgtgcgtatataaaatgagaaaaaagctgacgaatgatgccgtcagcttttctttatgcgtttacttaaaactcctcatactccgccgggtcttggccgtttatgcgtccgtcggggcgggtaagcgagtcgataatgctcatgtcgttttcatcaagggagaaatcaaaaacggagatgttttcaagctggcgctcgggcgatgctgattttggaatcgggatggcgcccagctggatatgccagcgtaaaatgacttgagaaatggttttgccgtatttgtccgcaatccgtccgagtttttgatcgttcaatacttcgccggcgcgggataacggactccatgattctgtcacgatgccctgttcttcgtgccattggcgctgctgctgctgattaaaagcgggatgcagttcaatttggttgatgccaggctttacgccggtttcacgttcgagccgttcgatatgctcaggcaggaaattgcagacgccgatggatcggatcaggccccattttttcgcatcaatcagtgcctgccatgcttccgtgtagcggtcttgtttcgggttcggccaatggacgagatacaggtcatagtagtccagaccggcgcggtataaagattcttgtatggtttgtacagctttgtcatagtcatggtagcgtccgggcagcttggacgtcacgtatagctgttctctcggaacagagcttctcttgatggcttctccgaccgtcccttcattttcatagttataagcggtgtcaatcagacggtagccgatatcaatggcgctggtaatggcatgaacgccgttgtttccgttaagagcgtatgtaccgaagccgatcgcgggaatgcttgtcccatccagcagtttcttttgcggaattgctccagtcatcattaaatccctccttgttttctactttaccattattcttacaaatgaaacataataatggaagggaatgagatgatccgcacatgaaaaaagctgacggagaaccgccagctttaaatttgaaacatccatgctacgacggggccgaagaccgaccctaacacggcgcagagcgtcatggaaacagaactcatggagaccgttaattctccgtactccattgcttttgaggtgccgagcgcatgggaagcgctcccgaatgcaattcctttcccgagtgagctgcggatgcggatccacttgagaagcagcggtcctaagataacgccggaaaaccctgcgatcatgacgaacacgactgtcatggaagggacaccgccgataccggacgcaatctgtatggcgacaggcgtcgtaattgattttgggataattgacaaaatcaaactccggctgatgccgaacagctctgcaaatagcaggccgctgaccattccggagaataaaccggccaacacgccgccgatgatcggaaacatatacttgattaacacccggcgctgcttataaagcgggtatgccaaagccaccacggcgggtccgagcagtgaattgatccattgtccgccgatcatatagtctttatacgaaatatgaaaaacaagcagcacggcaataatgaaaatcgtagtcgtcaaaaccggtatgagaaagggatatggaaagcgcacatataatttcaccatagccagataggcggcggccgtgaacaaaattataaggattgcgatacatgcttgctgcacttctttttctcctttctctgattggctttgtgctctaacagctggctggcgtaccctgcggcgatcattgtgacgatggtgctcagcacgatgatcagaaacagagcagccccgctggcggaaaacagtgacgggtaattgatgacgcccgtcatggccggaatgaataacagcggaagaaaagacagcaaaaatccggctccgtcttcaatcattttgacgggaatgatcttaaccgataaacatatgatcagcaggatcaaaccgatgatacttccgggaatgggcaggtgaaagaactgctgaacggctcccccgataaaggaaaatgcgaataaaataatgatttgcagtatgatgcgtatgactttcacgacaatgctgttctttggagaagagcagcttccccctttcttgatgcttcgatatgtttctttactttttgcgtatatatttgtactatacaaatatatgtatgcaaaatctttctatatgttttcttagtaaatgtgcatatgtttgtattatacaactaatattgctgttgtcaattgtaaggagtgaggctgtttgtcaaaacaagatccgattgaattaattgaatatgagctcaccacttttatcaggagagctgtttatcttgataactccgaccgtaaaatcggacatctggaaagggctgcgtatttgttattacggcagctggatgaattcggaccggcgcgtgtaaaggaattagccaaatcttttaagctggatatttccacattgtcacgccaggccgcggccttggagtcgaaagagctgatccagcgtttttccgatccttctgacgggcgggtcagtctgtttgcgattacgaagcttggcaaacagaggttaaaagctgataaaaagatgcgtcttgagcggtatcatcgtatgcttgacgattggtccggcgatgaaaaagaaatgttcggccggcttttgctgcggctgaatgaggcatttatcgattaatgcatgatttttgccgagttaagcaggattatggcgtatacaagggagaatggaagagggtaaggctttacgccattctgcttagcaaaaataatattgaatagggggcggaacatgtttctccaggggacatcctgtttctcggaggctgcggcatttattatctcaatattcataattcaataaaaatgaaagcgctttattttcggtttgttgatttagggtgcaaggtgtttacctgaaaaaaacaattgtattttccacgaaaatttattatgatggaataaggaaattggagattatataacaatagaaagatagaatatttctaatattgcgggaaatgaagagtgagttaggttcaacaggtgcaccttctgcttcattatttcacatatatcagagctgttaagaggaggaagcgaagtggcaaacaaagaattaaagagaggcttaggcgcgcgtcatatacagatgattgcgctgggcggcacgatcggtgtcggtttattcatggggtcatccagcacgatcggatggaccgggccgtctgtcctgctggcttatgcgatctcgggtatctttatcttttttatcatgcgtgcgatgggcgaaatgctctatgtagagccgagtacagggtcgtttgcgacgttcggccataagtatatacatccgttagccggctatatgacggcgtggagcaactggtttcaatgggtgatcgtcgggatgtctgaaattatcgccgtcggttcgtatatgaaatattggtttcctgatctgccggcatggattcccggcattatcgccatggccattctcggtgcggcgaatttaatttcggtaaaatctttcggtgagtttgaattttggtttgccatgatcaaaatcgtcaccattattctgatgattgtggccggaatcgggattattttcttcggtttcggtaacggagggcatgcgatcggattatctaatttatggtcgcacggcggtttctttacgaatggtttttcaggatttttctttgccttgtctttggttgttgcggcctatcaaggggtcgagctgatcgggattacggcaggggaagcgaaggacccgcaaaaaacgctgcgaagcgcgattcagagtattatttggcggattttaattttctacatcggtgcgattttcgtaatcgttaccgtatatccgtggaatgagcttcactcacttggcagtccgtttgtttcgacatttgcgaaagtcgggattacggcggcggccggtttgattaactttgttgtgattaccgctgcgatgtccggatgcaacagcgggatattcagtgcgggacgcatgctttatacattgggcgtgaacggacaggccccgaaattctttaagaaagtttcttcgagcggtgtgccgatattcggtacgtttgccgtattaatcggacttgtgatcggtgtcgtgctgaactacatcgcgcctccgaaaatttttgtctatgtgtacagcgcgagtgtgctgccgggaatgattccgtggttcgtcattttaatcagccatctcggtttcagaagagcgaagggcgctgagcttgataagcatccgtttaaaatgccttttgcgccgtttacaaactatttgacgatcgctttcttactcatggtattgatcggcatgtggtttaacaaagatacgcggatttctttggttgtcggggtgattttcctggcgattgtgacggtcagctattatgcgttcggtatcggcaagcgcatgcctggtgaaaaatcgaaaatagaagacgctgtataattcaaaaagacacctctcctacaggggtgtctttttcggcttgtccgcgagtggtatactggttaaaaaaagcagaaccgggggaaacatcgatgagtcattaccgtacgttattatttgatatagacaatacgctgctggattttaccgcttcagaaaccgatgctcttcaaaaattgtttcaaggttcaaagctggagctgacggcagaggtggaagcccgttataaagcgttaaatcaagggctgtggaaggcgtttgaagagggggaaacgacccgcgatgaagtggtgaatacacggtttgcccttttgtttaaagaatacggcctcgaagccgacggcgtgctgatgaatcaggcgtaccgccaatacttagaagaagggcaccagatgatagacggagcttatgagctgattgaacggctgagtcctttatttgatttatacatcgtgacgaacggcgtctcaagatcacaatataagcggctgggcgactccggtctgtatccgttctttaaagatgtgtttgtatctgaggacacgggttttcaaaagccgatgaaggaatactttgattacgtgtttgcgagaattcccgatttttctgccgagggcggacttattatcggcgattcactgagcgcggacataaaaggcggtcagatggcgggaatggatacgtgctggtttaatcccggaaagaaagcaaatgagtccggaatcatcccgacgtacgagattcattcgcttgatgagctgtatgatgtgctgaacgtggaggttgtcgctttatgatttctcaatatatgtataatataatttatatcaagttgtctcaggaaggattattatgaaaaatctttcttcaattagtacaagagtgctcatagaaaaaaccattatttgtttttccttatattctattatcagttctatttttaaaacgccaactttcacggcttcggaatccgcttacctgctgataatcaccatttttttagtcgtcaacgatcatatcagattaaaatacctaagcggtcagtattcttttagatattatgcatcttttttagtaagtaaccttttatcaggcattttattgtttaaaattaactgtctcggttctcaaatatataatattttcttactgatcgagattattgtaacaactcgtaaactgccctggactgtagtaagcctgcattttattattttttttacagctcttaaagcagcagggaccagcgggaaagatatattgatgtcctatttagtgatcatggctattatttatctgtttagaaacgtactgctcgaaaaagcaaaaatacaaacattaaataaagaattacaaagtgtaaacactaaacttaagaattattctcaaaagattcaagagttaactatttctaaagagcggacaagaattgcacaagagcttcatgattccctagggcattatttgatcgcattaacaatgaatcttgaattcgccgataaaatagtcagtaaaaatcccagcgaggctaaacaagtcatcaataagtcacatgatttatcgaaggagtgtattattaacctaagagaagctgtcgctttgctcaatgaccctgctcctcaaaaagggcttctgaaatcgatcaatgagatttttgaaaattttcagcaaacaaatgaaataaaattcgagcttgatatggacaataaagtagagtcagctgatcctgatatcaagaattgtctctataaaacagtacaagagtctataacgaacgggataaaacatggaaatgctacgtttttttcaataagaatacgtaagtcttttgaaaaaatctctatatcgataactgataacggaacaggatgttctgaaattaataagtcaaatggaataaaaggaatagagaaaagatttgctgcacttggaggagaggttgattttcattcagggctagattcaggatttactgtggaagccgtaatccccgagatagcagatctttaatccgaatgtgaggaggtattgatatggatattatcattgtggatgatcagcaaattgtcagggaagggcttaaaatgattctgagtctgcacgaggaaattaatattgtaggcgaagcttctaatggtgaacatttattagatttgctaaaacagataaggcctgaaatcattttaatggatataagaatgcccataatggacggcattgaagcaacaaagctagttaaagagagatatccggatattaaagtgattatcctgacaacctttaatgatagtgaatacatttttactggactgaaaagcggtgctgatggttacatactgaaagattctgattcacaagaaattattgattccatcaaaacagcatgtgaaggcaatattctgttaaatcctaaggtaacgctaaaagttgtaaaggctctaaattcggtagaacataataaagagcttgttcaagaaaataatgaaaaggaacagctggtgcaattgcttactcccagagaaaaagaagtcgctaaacagattatggaagggaaaagcaacaaagctataagcgaagcactttttattactgaaggcacagtcaaaaattatgtatcaagaatactggaaaaacttcaaatgaacaatcgaacggagcttagcttatatttacaaaagcatatgtgattcaacttttttccttcaatcagaaaggaatttcatcaaattcctttcctccattttcttctgaatatatccggacttacaccttccgtatatgactaaagtaacaatgcgattcctaactaaagtaataaggtaaatgagtactatagtaaattctaaaaatattccattcaggttaaaataaaagaaccgaaataccacgaggggtgttttaattatgctcgaattaaaaaaacttaccaaaaaatatgatgactttacggcagttaataatatttcgctgactgtagaagatggagaagtattcggactattgggtcctaacggtgccggcaaatcaacaatggtttctatgattagcactgttcttgcacctaccagcgggacaattaaagtagataataaatcacttaaggaaaaacctattgagataaaaaaaataatgggggttgttccacaggatttagctttatatgaaacgttaagcgccaaagataacttgaacttcttcggaagcctttacgggctgaaagggaaaaagctaaaagaaagaactgatgaggttctggagattattgaactgacagataaaaaaaatcaaaatgtatcagagttttccgggggaatgaaacgccgggtcaacataggtgtggcgttaatgaataatcctaaattattaattcttgatgagcctacagtaggaattgatccgcaatcaagaaatcatattcttgaaacagtaaaaaggctgaataaagaaaaaggaatgactgttatttataccagccactacatggaagaagtagagtatctttgcgagaaggtggcaattgttgatcatggatctcttattgctttaggaacgaaagaagaactcaaggaaaacttaaatgcttgtgacactttaaccgttacttttaagggtgctgatgaagaggcactcagccggataaacagcattacaggaattgataaagtgacggtagatcataaacaaatttcaatgcttgtatcgacgaaggaaagaaacatcattgaaattgtagatgatatcaaaaatctggggatcgacctcactagctttaagtacgaggaagtaaatttggaaagcattttccttcaaattacagggaaaaacctaagagattagtaggaggaggctatcttgagaaaattattcaacttattttttcttgattttaagctgttaacaaaaaataagtcattttatttaaagctgatgctgtttccatcactgctaatcctcatattgggcagtgtgttcagtaattcagattcaaaaatcgaagcatttgatgtagctttttactcagcagattcaggggagagtgtttctttaggtgatgtcttaaaggataaagtttttaagaaaggcgatctcaaagatatcattcatttaaaagaagctgagagctacaatgacggtgaaaaattagttaaagaaggaaaggctgcagcttttatctatgtaccggaacactttacgaaagccgttatgaacaacgggaaaacaaatatcgatttaattggagataataacaagaccatagataaaaatattgttcaggctgttttggagggctttacgaaaagcgtgaaaacaatgagcgctgagcaacaagaagtaataaaacatatcagctccggcggcagcgtaccacaagaaaaaatagaaaaaatgatgaacgatttggccgataatgacgggatctccgctgatatcccaaaagcagcgacaaataaaaatgcggttcctgtcgattccatgcagtattattcaattgcaatggttgtcatgttttccattatgacggcttttgtgcttgttcacagcattgttgatgagcggcagaataatacgctgttcagaattaaatctacaccgactttaaatattcagtatgtgcttggaaagttgacaggtattatttttgcgatcttaatgcagatgactgctgttattctgataagctgggtcgtattccgaatgaactggggcaacttgtttgatatttttgttattacggtagtatacgcatttgctataggcagcattgtattgttttggggttttaccgctaaggaccacgtggcggtgtccagtatggcttctccggttctttatatttttagttttttgggaggcagttttatttctaagaacggactgcctgatagcttgagggttgttcaagagatcataccgaacggtaaggcaataaactcttatttaaaagtcaaacagaatattggtcttagcggcatgtatattgatttgcttgagctaattggtattggtctcatctttgtctttattaatattatggtattcaaccggaagaaggtggcgtagtagtgcaattgattgccatgattaaacatcagctgaaactgatgctccgaaatagattagcaatttttgcaacgatttcggtgccgttaatccttacatttttgttctctttttctcaagatacggatagcaaagagaacttgtatatagccaatgctgataaaagtaactatgctgcaaagctcattgaaatgataaaagagcataaaaatattaaagttataaagctaacggaaaatgaattaaagaaaaaagtcgatgatcaggatattccttttggggtcgttattgaaaaaggttttggaaaggatttgacggacaatcacaagataaaaatgaaaatcatccaaaactacgagaacggcagcggaacattgttagagcagctggtcacaaatgaggcgggaactcttaaaaaggtagttaaagattcgcaatatatgtctgcacagttgcatacggactcaaaagatatagaaaagaacattttcaagaaattgaaaaacaattcaggaatagaagtgaatgacaaaacattaagtcagggtgaacatactcaggataatgcgaccgtgagattaattggttttcttgtaatgtttatttggtttgttgttattcaagggttaagaacacttattgatgaaaaagagaataatactttcagcagattactaagtacgcctataaactatacaaaatatgttttatccaaaatggctgctacttatatttccggaatcattcatataatcgttattatacttgcgggaaaatatttactcaagatcagcataggtcataacatctttgccatcgctgttatgctcgctgtttatttatttgcattgacctgcattacgatgattatggttccatttatgagaagccaaaagcagtttacttctgccgcatcgatcataattgcagtaagcgggatgataggcggttcctttttctcattggaaattgctccaaaatatatgcaggttatttctaaatttacacccgaagcatgggcaatacagtctttaaacaacattatctttagtaagagtaccttaggaactgaatggcttccgatcgtaatttttgcaagtgtcggcttattaagtattattgtatctttcatcttaataagcagggagattaaaaaaaagaaaaattaaatcaacaataatctgataaaattaacagatcaaaaaggacgtgagggaattgggtatggaagaactatttggaatggctgaattaattataggtgtactcatgaatgtatttatcggtaaaatcgggcaagttgcttttggaaaagataacagaacaacaaggatcattttaagagtaataggaatcttcctcatcatcaacggagtttcaagagcatttcatatataaaatgagatagtaaaaaacatccttttcagggtgtttttttatcgggttattacaaaatttctgaggtgaattatgaaaaaaatattttgtcttccgtatgcagggggatcaagtgcaatatactataaatggagaaggttaatgagtgactctttaacaatacatcctattgagttaaaaggaagaggtacaagaattaacgaagatttttatgaacatatagatgaggctgttaatgatatatatgatctgataaaggatcaaatcagggagtgtgattatgctttattcggccacagtatgggaggccgattagtttataagttatatagtaaaattgctgaaatgcagcagaagaagccaaatcacatatttttctccggctgcggcattcctaaaacgaagaaagcagaggggatgattcatgctttgccggatagtttatttttgcaaagaatcatggatatgggcgggacttcggaagaactgttacataacaaggaattacaacaattatatcttcctattttaagaagtgatttcaaaatgttggaagaggatgttatttctgaaaataagactgttatggactgtgatataacagtgttgcatggtaataatgacaagacgataagctcagatttaatatgtaattggggacattatactttagggaaatgcaatttttatacgtttgaaggaaatcacttttttattcatcaattttcgaatgaaataacggacattataaataaaaccttgagatgaatttttgattaaaaaatcgggagtgttactttgtcccggtttttttttatgttaatacgaaaaataaaaactgggttaatgtgcttaggtgtttttcccccccctaattgacaactcttaaacatttgtataatatttcttaaagatggctagttcttcttcattatcctttttttaaaaaaagtgtttgtacgggtctatatcattaaaaaatggtttttgctgccgataaataaactgtcagactacaacaacaattattggtgagcggtattgcctgtgatgcagtttaacataaaaatccaccgaaagcctctgctgttttaattcagtgaatgagttgaattttgatatcaagtgaaggagtttttgttatgacaaaaagtataaagggagataaagacagtattggtgagttaaaaactgaagagcattttttagtggcaagtaaaccttctaaagaaaaaagaatgaaaaatcttacatataaattttcacagcaattaagcgataagctgaatgtatactgcaatggatcggatgaacgtctgcatgtcgtattaacagcggcactgactttgttaataaatcaatatacagaaagacaaaatattgtaatcaaaactcctgttttcaaaaagaacagaacgattgattgtgagcaagaaattttgactcttaaaaatgctgttcatggtgaagacctattaaaagagatcatacataaagtcgaattcaccgtagaacaggcattggaaagcccccaaaataattctcgaacaagtgataaaatgactggccttccttttgatgtcatgatagtccttgaaaatattcaagaatacatacttaatcaagaaaatcccgctattcatatcctattttcgtttatgaaccagaaacaatacatagagacagtcatacgctataacgaatgcctctattctcaaaatatgataaaagatttgtcactgcgatttcagatgatccttgaagctatgataactcctgaaaatatcagagtgaaagatatgagattcctgaaagaaaaaaataagcaaaagaaaatctttggctgggaagacaattattcgaaaattggaacaatttcggaggtgtttgagcagcaggctgatgaatattcggataagactgctttggtactagaaaactcttcaatgtgttacgcagaacttaatcaccgtgcgaaccagctggcacggtatcttcaggagtgcggagtaaaacggggagaccttgtcggaattgctttagaacgctcttttgatttgtatattagtattctggcaatattaaagtcaggcggtgcttatgtgccgttagaccctcaatatccgaagcaaagactatcattcttaatcgaagattcaggtgtagagttgctgattacaaacgaaagcattcagtcacaactcccgcctcacggggacggcgtaatctgtttggatggtatgaaagaagaaattgaaaagatggatggatctaatattggcataaaaggttccttggatgacctggcttatgtcatgtatacgtcaggctcaacgggactgcctaaaggagtaagtattgttaaccgcggtgtgattcggctggtgaaggagactgattatgcggtatttgatgagaatcaaacgtttctgcaattagcttctgctgcttttgacgcttctaccttcgagatctggggctgtttattgaatgggggatgtctggctataatgcctccgggaataccgacggctgatgatattgcagaagctgtgaaaaaatataacattacgactctttggctgacggccggtttattttctctagtagttgatcagcagttagaatcattaaaaggacttcagcaattattagtaggcggagatgtggtttccgttccgcatgttcaaaaagtattagcgcttggaaaggtacaagtaattaacggatatgggccgacagagggaacgacctttacctgttgtttcccggtccctcaagattggaaaggcagtatgcttcctatagggaggcctatttctggtacagaaatattcattttagattcgcaattaaaaccggtagcgccgggaattcctggtgagctgtttattggcggagatgggctggcgcgtgagtattggcgacggcctgatttaacgaaggaacggtttatatcacaccctttcaataatgatccttcagcacgtctttataaaacaggagacttagtgcgttatttagaaaatggcgatgtggagtttattggacggcgggacgagcaagtcaaaatccgcggttttagaatcgagcttggggagatagaagcccgattgatcaatcatacagaaattaaagaagcggcagtaacagtaaatcataatggtgatgaagatttatatatctgtgcttattacacttcaaatcataaaatcgcaaagattgaattgcagcactttctgagagactttcttccggaatatatgattccatcgtactttaaacaaatggataacatgcctttgacggtaaatgggaaaattgacagacgggcacttcctagacctgatatatctcaaatgtccgaaacaaaatatgaagcgccgacaaatgaaacggagaaaaaactttcggagatttgggaagctgtacttggcagggaacgcgtcggtatagatgaaaatttctttgaaaccggcggtcattcactaaaggcttctatgttaatttcccgcatcagaaaaactttcggcacggatataaaggtgaaggagctttttgagcagcctaccattaaacagctgagccgtcttattcaaaagcgggataaacagaattatccggtcatcagtaaagcgaggaagcagtcttattatcaagcatcatctgctcagaaaagaatgtttgccctttgggagacggataaagacagtatcgtttataacttgccgattatgatcgaactaaatggaaaattagatgtaaaaaaagccgaatcagttttacaagagattattggcagacacgaagcgttacggacaagtttcgatgttgtaaacggcgatgtggttcagattattcacgatacatgggagctcgaatttgattatcagaagctgccgtctgatgggatacgaccatatgtgaatcagtttatcagaccctttcatttggacaaagcaccgttaatcagaggcggactcataacgtatgaagaccggaatctgctgctgctggatgttcatcatatcgctgcggacggtgtatcggttggaataatccgcaaagaattcaatgcgctgtatgcgggtcatagactaaaacagccgccgctgcaatataaagattattcagaatggcaagtaagctcaggaacaaaagaggcgttaaaggaacaagaggagtactggcttaagcggttaagcggagatctgccgattctcaatctgcagactgattatgagcggccgagagtcaaaagctttgaaggaagccgaatcagctttacggccgatgaaaggttaacatcaagcttaaagtcggtggcgaaagaaacaggaacaactttgtacatggtgctgctggcggtatataatgtcatgctttcaaaatacagcggtcagcaggatgtgatcatcggaacagcagagtccggaaggtcagacaccgaactggagaatacggtggggatgttcgtcaataccgtcgccataagaaattttcctgaggaacataaaacattcagagcgtttttagaagaggtcaaacatcatacgttaaaagattttgagaatacagattaccaatttgaaaatattgttcaaaaactcggggtaaaaagagattcgagccggaacccgctgtttgatgtcatgtttacttttgagagtaaggattacggattcggaggaaatgaagagacagcagaatcaaatttactagtatctgaggtcaatatatcaagatttgatttaacgttaactgcaatggaaaccgatgaaggcgttaacttccaattggaatattgcaatcatttattcaggagagacacagtcgaaagaatgggtgctcattatacccggcttttacaacaggttgtatcagaaccggacacggcaatctgcagactgaatatgataacggatgatgagaaacataaactgctttatgtattcaatgatacagcagccgacttcccgcataataaaacaatccatcaattgtttgaagaacaagcggaaaagacaccggaaagaatagcggcagtgtatgaaaataataaagtaacttataaagaacttaacgaaagatcaaatagtctggcgagaacactaatgaaaatgggggtgaaaaaagagtcaatagtaggtattgttgctgacaaatcattagagatggtgttaggcatattgggtgtgctgaaggcgggaggcgcatttttgccaattgatccgggatatccttctgagagaatcaaatacatgattgaagacagcggttctgacattttattagtgcagaatagtcaggctgacaatattccgtttgacgggaaggttattgatttaacagatagttctctttactccggagatcggcataacctgccaatggtgagttccgcagaacatcttgcttatgtcatttatacttctggaacgactggaaaaccaaagggtgtaacgatccggcatatcggaatcagtaatctcaaaagtgtctttgaacatgatatgaatatcaattaccgggataaaattattcaatttgcaagtttttcatttgacgcatcagtgtgggaaatcagtatggcactgttgaccggagcggaactacacatcctttcaagtcaagtcatcaataattatacattatttgaagagtatattaaccggcatgacattactgtagccactttgccgcctgtatacatcaatcatataaatataaacggattatcagctttaaggctcttaattactgctggttctcagatatctacaaaatccttgaaccggatcgtgaataaaatagactatattaatgcctacggtccaactgaaacgacaatctgctctacaatgtggagatactcagaagctgagagggcgatggcaaagaccattcctatcggtaagccgatcagaaatctgaaagccttcataattgatcaccacaacaatcttgtgcctattggtttagcgggagaattgtgtgtgtcgggtgacagcttagcaagaggatatctcaataaagagaaattgacgcgtgagaagtttattgatcatccatttgagtccggaactaaaatgtaccgaacaggagacttggcaaggtggcttcctgacggaaacatagaatttttggggagaattgataatcaagtcaaaatcagaggcttccggattgaaactgatgaaatagaaagccagcttctgaaaataagcgggataaaagaagcagttgttatagataagtgcgaccttcaaggtgacaaatacctttctgcatttgtaaccgcagaatataaaatgtccggagcagctttgagggagcaattgggtgacattttgccacaatatatgattcccggtgtcatcatccaggttgaacagctgcctctcacaccaaatgggaaaattgacaggaaagcacttgctgaaatagaagagcctaaacatataaaggggcaccttgaagcaccccgttccgaagtcgaacagattctggtaaatgtttggtcggaagttctgaaaattgatgatattggtattaatgataattactatgagctgggcggagactcaataaaatctatactgattgtatcaaggcttcaaaaatacagtctcagtctagaggtaaaagatcttttgcagtatccgcaaataaaaaacctcagtaaacacgtgaaattatataaagctcaaacagatcagagcccggttagcgggagaactgaactggcaccgatacaaaagtggtttatagagaaagactttgaggacattcaccactttaatcaggcattcatgtttcaaatgaaagaaaaaattaatgaacacgctctggcaaagacatttgaattattagtaaagcatcatgatgctttgaggttgatatatacagctgaaaatgacgaaataaaacaagaagtcagagatgtccaagccgcccgggatacttttactctggacatatatgatctgcttgctgatacggattacaaaaatacaatagaaaaacttgccgatcagttacaaagcggaatggatcttgaaaaagggcttttaatgaaacttggtttatttcgaacaatgaggggcgattatctacttattgctatacatcatatggtgattgacggagtctcttggagaattctgcttgaagatatggagcaggtctacaacaatctgcaaaaaggagagccggccgttcttccgccgaaaacggcatcctttcaagaatggacacgtaaattggcggaatatgcaaacggaagtgagataagaaaggaacttcggtattgggagaatatcgaaaaaatgaagattaaagaaattccgagagatttcaataaagctgacagtgtatttaaggaaagccgcaccattactgtcagtcttacaaagcagttaactgataagctccagaggaatacaaatgcagcttataacacacagattaatgacatcttgctttgttcactgggaatggcagtaaaagaatgggcgggacttgacgaggttttaatcggtctggaaggccacggaagagagaacatattagaaaacatttcaatagaaagaaccatcggctggttcacctcactatttccgatcgtgttggatatggagcacagtgatgatctgccttattgcataaaaaatacgaaagagtatttaagaagaatacctcataaaggtattggttacggaattattaaatacttgacggcaccggaacataaaaaagacatcagttttacgataaagcccgagatcgggtttaactatctgggagaaatctctcaaaaaaagcgggctgtttttcagcatgcagatatatcatctggtacaagtgtttctttatctaataaaaaattgaatgccatcgaaatcaacagctttattatggacggtcaactgcagttggaatttaactatagtacgaaagagtttaaagaagaaacaattaaaacattaaccgaatcctatataaaccggttaatcgatattattcagcattgcggaatgaaaaaaattcctgaaaaaacaccctttgactatggagatctggatttatccatcggagatttggagctgattttatcaagcggaaaagagatagagaaaatccactccctgactcctatgcagagcgggatgctttatcatgcattgcttgatccgttttcacaagcctattttgagcagcttacattttctttatccggtcagcttgatattggcagattaaatacagcttttaatatgctgatcgagaagtatgaaattttaagaacatgcttttttcatgaaggactaagtaagtttaaacaggctgttctaagagagagaaaagttaaaattgaatttgaagatatcagcactttctcggaatatcaaaagaaagtacggcttaaagatgttcagtttaaagacaggggaacgagattcgatttgacgaatgattgcttaataagagtaaccgtattaaaaactgatgagaaagaatataaactgctgttcagttttcaccatattattatggatggctggtgtatgagtttaataatgaatgatataaaaactatttatacgtcattaaaagaaggaagagagacagtgcttcagcataccgagccttacagcacctacttagaatggctggataatcaggacaaaagtgccgcattagaatattggggggattatctaaatgaatatgagcagcaagccggtattccaaagttctgctgatgagggtggtttcaaaaataggaagaaaacattcattattgatgaaacatgtacttcgatgttgaaagctgcagctgatcaatatcacattactttaagtgcattgattcagactgcatggggagttcttttgcagaagtataacaacgtgaatgatgttgtgtttggtgcggttatttccggaagacaatgcagagtgcaaggcatagaaaaaatggtggggttatttatcaatgcggttcctctgagagtaaaaggcgatggtgatacggtatttatagcattagcccaaaagctcaacagtgactttatcaaagcgaatacatcatacggttacagttctttagcggatatacaagctcttacaaagatgaaagagaaactgatcaaccatatgttggtttatgaaaattaccctgttgatgactatggcaaggcggtcgatgatacaactgatgctttaaggattacagatatggaagtgtttgaacagacgaactatgactttgggctggttattattccaggcagccaaatcaaagcagagatgacgtataacaataatgtttatcgtgaagatatcattaatcgtataggtgttaatttctgtcatgtattaaagcaagtggcaactgatcctacgcgtgtcctgaaagacatcagcgctgtaaatgaagaagagcgcggaatgctccaggagtttaataagcagtcctctaattatacggtgaataaaacgatacaagacctttttgaagaacgagcggaaaagacacctgaccaaacagcggctgtctatgcaggaaagcatatcacttataaagagctaaacgaaaaggcaaatcaagtcgcaacattattaatggaaaaaggggcaggaaaaaacagcattacggctatgatgatccgtccttcagaatattcaatgattggaatgctgggaattttaaaaaccggaagtgcgtttctgcctattgatgatgaatcaccggtcagtcggataaatcatattttaaaagatagcaaagctgatatcctcattacagatttgtggtttttaactgataaaaacattgcggcggaatgtttggatattacggataaatcgatttataccagccgaaatacatcaaaccctgatgttcagtatgatctcgaggacgaggtatatgttatatatacctcgggtacttcgggaaaaccgaagggggtgaaggtgaaaaataaatcattagttaattattcattatgggtatgtgatcaaataaacataaattctgacagcaggtcgttagtgacgtcaaaatatagttttgacttatgctataccagcatctttccagttttatccggtggcggacaagtccactttgttgataaagaagtgtatcttcactctctatcattaatagaatatatttataaaaatagtattacatatcttaaaatgacacccactttattttcaacattgatggaggatgttgacatgctggcgtcttgtcctgatttaaaagttatcatactgggcggcgaaagcataaacatcggcaacgtcaaaaagctcgctgaaaaatgcagatggatgaagtttattaaccactacgggccgaccgaaagcactgttggctgtattgcacatagcattgatccagatcatattcaaaactgtgaaatatacaataaaataggaagaccaattcacggcattaatatctatattgtggaccgttcagatcaactggtccctgtgggagcacccggtgagatttgtatcagcggggtaggtttagcatcgggatatgtcaataatgaagaattaacgaataaaaaatttattgataatccttttcatcgcggaacaaaaatgtacaaaacaggagaccttggcagatggatgccggatggaaatatagaatttttaggccggattgacaaccagatcaaaatcaggggttttagagttgaaatcggagagatcgaaaaccaactattacagctggaaggtataaaagaagcggcggttgtttatatagaggagaaatatctttctgcatatattactggggacattgagatagaaggctcgttcgtacaggagaaattggcacaggctcttccgaagtatatgattccgagtttcataatacaactgaaagagctgcctcttacagctaacggaaaaatcaatcgaaaagagctgcctcttcctgacttgcaacggttgtcagtacctcaatacgaagctccggcaaatgaaacggaagaaaaactagctgaaatttggaaagaaatacttgggcataaacggatcagtataaatgaagatttcttcgaactgggcggacattctttaacagctgcgttcactatttcccgcatcagaaaaactttcggcacggatataaaggtgaaggagctttttgagcagcctaccatcaaacagctgagccgtcttattcaaaagcgggataaacagaattatccggtcatcagtaaagcgaggaagcagtcttattatcaagcatcatctgctcagaaaagaatgtttgccctttgggagacggataaagacagtatcgtttataacttgccgattatgatcgaactaaatggaaaattagatgtaaaaaaagccgaatcagttttacaagagattattggcagacacgaagcgttacggacaagtttcgatgttgtaaacggcgatgtggttcagattattcacgatacatgggagctcgaatttgattatcagaagctgccgtctgatgggatacgaccatatgtgaatcagtttatcagaccctttcatttggacaaagcaccgttaatcagaggcggactcataacgtatgaagaccggaatctgctgctgctggatgttcatcatatcgctgcggacggtgtatcggttggaataatccgcaaagaattcaatgcgctgtatgcgggtcatagactaaaacagccgccgctgcaatataaagattattcagaatggcaagtaagctcaggaacaaaagaggcgttaaaggaacaagaggagtactggcttaagcggttaagcggagatctgccgattctcaatctgcagactgattatgagcggccgagagtcaaaagctttgaaggaagccgaatcagctttacggccgatgaaaggttaacatcaagcttaaagtcggtggcgaaagaaacaggaacaactttgtacatggtgctgctggcggtatataatgtcatgctttcaaaatacagcggtcagcaggatgtgatcatcggaacagcagagtccggaaggtcagacaccgaactggagaatacggtggggatgttcgtcaataccgtcgccataagaaattttcctgaggaacataaaacattcagagcgtttttagaagaggtcaaacatcatacgttaaaagattttgagaatacagattaccaatttgaaaatattgttcaaaaactcggggtaaaaagagattcgagccgaaacccgctgtttgatgtcatgtttgtacttgaaaatgcagattacggtattgaaaatcacttggatccaaatccggaagagtatattcaaaccgagatcaatatttcaaaattcgatttaacgctaaccgcgacggaaattgataaaggaatcaaattccatttggaatactccagtcaattatttgtaaaagaaacagctgagagaatgggtacccattttacgaagcttttacaaagtgcagctgccggcctagatcaacctttaatgaaactggatatgattcctgaacaggagaagcacacattgctccatgtattcaatgacacggcagctgaatttccgcggaataaaacgattcatcaattatttgaagagcaggcagaaaaaacacctgaacgtattgcggctgtccaagaagatacgctattaacctataaagaactaaacgagaaatcaaacagcctggctaatcttttgagacaaaaaggaattagagaaaacagcattgtcggaatcatgacagagagatctcttgagatgatcatcggaattatcggggtgctgaaagcagggggagcgtatttgccgatagatcctgaatatcctgatgaaagagtaaattacatgctgaaagacagtgatgcaaacattctcctaattcaaaacggattgtcaggtggtattacattcaataaagaaattttatcattaagcgatcctgctctatatatgcataacagaagtaatctgccgaatgtcagttgcccggaagaccttgcctacatgatttatacttcagggactacagggctgccgaagggcgtcatggtaaaacataaaggtgtggtaaattatattcattgggcaaataagatatatgtaaatgatgaagatattgattttcctctgtattcttctatttcttttgacttaacggttacttcaatttatacaccgcttatttcaggaaataaaattattatttatgagggaccggacaaggctcttctgatcagaagaattatagaagaaaataaagcggatattattaagctaacgccgacgcatttgagattgctggagaatgtagatttaagtacgtcaaagataaaaaaaataatcgtcggcggggaagagctgaaaaccgggcttgcaaaaaagatacacggtgcatttaacggtcatgtcagaatctacaatgaatacggcccgacagaggctacagtcgggtgtatgattcatcaatatcatattgaaagagacaatggcaatgcagtatcaataggcaaacctgcggataatactaagctttatatattaggaaaacaattggaattacttcctttaggggcagccggggaactttgtgtcagcggagaagggcttgcggacggatataaaaataaagcgggcttgacgtcagaaaaatttgtagataacccctttgaacccggggctaagttatacagaacaggggatatggcaaaatggatgccggacgggacaattgattatttaggaagaattgatgatcaagtcaaaatcagagggtatcgtattgaaacgggagaaatagaaaaccggcttctgaaaatgagtcacataagagaggctgttgttgtagcgagagatgaccaacatggggataaatatctctgcggttatgttacttccgacaaaaaaatagatgtttatgctttaaaagaaaatctgtctaaagaattaccgttatttatggtgccaagttatatcttccagattgaaaaaatgccgttaagctcaaacggaaaaatagatacgaaatcattgccgattatagatattgcggatgtattggagtctgcatatgaagcaccgcgaaataaaaaggaacaaattctcgcatgcgtatgggagaaagttctggggatgaaatcaatcgggattaactataactattacgagatcggcggagactcaattaaatccattttagtagtttccgaactccaaaaatacggcttaaaacttgaagtcagagatttaatgaaatatccgcacataaaagacttgagtgctcacgtaaaatcagctgatatacaagcagatcagtcgattgtagaaggagacgttgatctgacaccgattcaaaaatggtttatagaacagagatttgaacaagaaaaccactataaccaagcctttatgctttacaaaaagtccggcatagaagaaaaagcaatcgaaacggcctttttggaactggtgaggcatcatgatgccctcaggatgcagtttaaaaaggaaaacggtgaaattaagcaatggaataggggcattaaacaggcaaaagaaacatttactttagacgtatttgatatgacacaaacagaagatccagccatggcaattgaatcactggctgaccgtatgcagaacgaattgagcttggaaaaggggattttaataaaactggcggtatttaaaaccaaaaacggagatcatcttctattaaccattcatcatatgatcattgacggagtatcttggagaatcctattggaagattttgaaacagcttatcttcaaacagttaatgggaacaaggtggagctggaaactaaaacagcatcgttcaaagaatgggcgcgtcaattgaaagaatatgcaaacagcaaggctcttcaaaaggaagctgggtactgggagaccatagaaacggctattattgaacctcttccaaaggatttcattgccgaaagctgctcttatgaagatagtaaagaaattaaaattgaattaacagaggatcaaacaaaaacacttttaagaaatacaaatgcagcatatcatacacaaattaatgatatattgctttgctcactgggacttgcagccaaagagtggaccggcaacgagaagatccttgtgaatcttgaagggcacggccgtgaaagtgttataaaaaccccggtccatcgcacaataggctggtttacgacaatatacccaattgttctcgatatgacagaaagtaatagtttatcaagctccattaagtatacaaaggaaatgcttagacatatcccccaaaacgggattggttacggaatactcagatatttgtcggactcggttcaccttcaattaaaacctgatatcagttttaactacttgggtgaatttggccaagaagatcgcagcaacctatttcaaatatcacctttgtccgccggaacgagcatatctggaagaaataaaaagacacatagtatagaaataaatggatatatcatggatggcaggctgatgttttcgttcaattacagtgcaaaccaatataaacgagagacgattgagcaatttacgaaagcctatcaattgaaaataaatcagatcatagaacattgtgtgaataagaaaatatctgagaaaaccccatgggattatggggatcccgatcttcaaatagaggagttaaatcaaattcttgcaagcggtgctgaagtagaaaaaattcattctctttcaccgatgcaggaaggcatgctgtataacgctgtgattgaccatcaatctagcgcttatttcgaacaaagtgaaataacagttgaaggaaatctgaatacagaagttctcagtgacgcattaaacagactgattgctaaatatgaaatattaagaacgtcatttttctataacggtttccgtgtatttaaacaagccattttaaaagaaagaaaactaaacattcaatatcatgatatcagccaatgggaggagcagaagaaggatgcctttgtagggcaattcaaggtgagagacaggaatactccgtttgatctgaacaaagattgtctgatcagagtatcggtgatcaagctgggaagaaataaatttaaagtcatatacagtttccaccacattattttggatggctggagtgtcggtattctgttaaaagagcttatggatctatacggtgacgtggctgaagggaaaaaactccttcaagaaacacctgtaccgtacagtcgttatcttgaatggcttgatcagcaggacaaggaccgtgcatttgaatattggaaggaatacctttctgcatatgaacaagagatctcatttccggaactggaattgaaatctgacgagtatcagcatgatcaaaaactgggagcgcttaacggtgaaaccgccgctaagctgaaaaaaatcgctgagtcaaacagcattacattaaattctatcgttcaaacagcatgggggatattgctgcagaaatataacaatacaaatgatgtggtatttggttccattgtttcaggcagaccgagtgagataaacggaattgaaaatatggtcggcttatttataaatgcagtgccaatcagagtgaaaagagaatgtgatacatcatttatttcattggctaaacaaataaataaagactttattgaagcgaacgaatacagttattgttctctggcagacatacagtctttgacaagtatgaagaataaattaatcaatcacgtagtcgtgtatgaaaattacccgttgaatgaggatcttttccaagattcagcccattcgagtgtgaaaataactgctgaacatgggtttgaacaaaccaactatgatttagagcttttaattgctcccggtgacgaattgcatatgaaaatcacatataacgccagtgtttacagtaaagaaacggtaagttcaatcttggataacctggttagcgttttacagcaggcagcggctgatcatgaagtaatggtttctcagatcgatatggtaaatgagacagagaaacaaaagctggtgaaagaattcaactgcacggaattatcatataagaaagaaaagacgttacaagagcttttcgaagagcaagctgtaaggacacctgatgcaatcgctctggaatggaacggagacttcctgacctataaggagctgaataataaggcaaatcaattggcacgagccctcagggaaaacggcatcaaagagaatgttgtggttcctattttggtaagaaggtctttccgattgattataggaatattaggaatactaaaggcagggggatgttacttaccgcttgatccagattatccggcagacaggatcaattatatgctgaaagacagtaaaagcggcctgctgttaactgaggaaggacttccaaatgaattaacgtacagcggaactgtatttaacatagattcagaggatttattacatcacttggagacgaacattgatgttattaacagggccgaagatttagcatatgtcatttatacgtcgggatcaaccggaaaaccgaaaggggtcgccgtagagcaccgtgccgttcataactttatcaagggaataacagacagggtcagcttttcacaagacaatgtccttctttcggtcaccacgtgttcatttgacatattcggattagagtcgctgctgcctttaactcaagggctgaaagttgtcatagccggtgaagcggaacaaagagatccgtacttgttaaacaagatcgttgttgagactgatgtcaatactattcagcttacgccatccagattaaagctgatgctaagtgcagaaaacagcacggagagccttcagaaattgaagaccatcatggttgggggcgaggtatttcaacgggaattgttatttgaactaaaaaaatataaaaatctgaagatctataatatgtacggtccgactgagacgacgatttggtcttctgtgaaagacttaaccaatgaaaatagtgtaaatataggcaagccgattgcgaatacacagatatatattgtagatcatgatggaaacactgtaccgctcggcagtactggcgaattatgcattgctggagccggaatggccagaggatatttaggaaaagaagatttgactgcacaaaagtttgtagacaatccgtttgttaaaggaaccaagatgtataagacaggagatttagcaaggtggctgcctaatggtgaactggacgttatcggaagaatggacaatcaggtaaagatcagagggtatcggatagaattgggagagattgaaagcatagtaaaccaacacgaaaaagttaaggaatgtgtagctgccggaaaaacaaattccgcaggagtccaagatttagttctgtattatgtggcagaaagcactgtatatccttcagaatttattaaattattatcacctgtgcttcctgagtatatgattccgcagatctttatgaaaattgaccaaattccgctgacagcaaacggaaaaataaatgtcctggcactgcctgaacctgtgatagatagaacaggttttgaccggccttttgaggaagcggtaacggatgtacaaaaaagtatcagccgtgtttggaccgatgttttaaaaatagaagagcttggaatacatgataacttctttgaagcaggcggtaattcaatcaaaatcgttgcagtttataatgagcttcagaagctgtatccaaaacaaattcaaattgctgacttgtttgcatatccgactatttacagattgtccgaatatatagaatcagctatagcctttgcggagatagcagtgtccttggaaaaagaaatcattcctattactttaccgcttgaatacatctcggaatcaactggacaaagtcatacagccatgcacgaatatgcggtaaatgcgaattattatgatggtttaaaaacaatatgcaatacctacaaatatgatatttctcatgttttattagcgggttatgtatttttattagctgatgtcagccagcaaaacttggttcatatccaattttcgggtcatggagatgatcggatgagtcagctgtcttttgatctgtctgatatcgagaattttcacgatattattcgtatggcgaaggagcagattgagaatcaagaggattcagatcaatacgatttgaatactcactataagaaatcaagttcggcccaagatgtttttcctcttttttatattagtaatgaatcaaaaaaagagtactcagaattatatgatctggtttttgcagttcatgaaaagccatccgaagcagaaatcgtttttatatataaccatcagaaactaaatgagcacaaaatgaaagatttattttataactacatgaatttgattcaagtgattacagcagacaaagcagacaattcaatataaagcggccggttctgccttacattttgctgatcggcagaatgtaaggcaaatcaggcattatagagactttggaggtatttaaatgtcgaaaataggttttttattttcaggacaaggatctcaatatgcaggaatgggcaaacgtttatgtgacaattttattatcgctaaaaaaacgtttgacgaagccagtgatgcattgggatttgacctgaagaaattatgtatagatggaagtgccgctgagctatctcaaacagaaaatactcagccggccatcctggcaacaagtattgcacaattcagaatctacatggaagaggtcggaaaagaacctgaatacatcgccggccatagtttaggagaatattctgccttggtttgcagtgacgttttggattttcaggacgctgtaaagctggtgagagccagaggattattaatgaaagaagctgccgcacaagggaccggagcaatggctgttatcaggaacctggatgaaagaatagcagaagaagagtgcgaatctctctcttcaagaggaaaaacgattgctgtttctaactacaatggatataaagatgttgtggtatccggagaagcggcagcagttgaagagcttagtgaaactcttaaagccagaggagcagacatttttaaattaaatgtaagtgctgcttttcattctccgatcatgggttttgctgcggaaaaattcagccatgagctaaaaaagtatgatctcagaactccaaaatacaaagttttatctaatgtgacggctcttccatattcggataaacagcaaatggctgacatactgggaactcaaatcgtaaaaccggtaaattggatgggaatcatgaagtatttagaagcaaaccatactgatactgtgattgaatttggaccgaaatctgtattaaggaatcttgtaagaaacaatatcgctgacatcaaatcgtacagctatgacaaagaagaggacgtgaaaattataaaagagactcttttgaacgaatctgtttcactgcaagccggtttttctattatctcgagaagtttagggatcgcggttgctactaaaaattacaactggaacaatgaggaatacgccaaaggtgtaatcgaaccatatgaaaaagtagctgccatacaggctgaacttgaaacatcaggtcgtcagccgtcaagagaacaaatgcatatggcagtagaaatgctgaagtcagtgtttcgaaccaaaaaaacccctatagatgaacagaaaaaaagatttaatcaattattttctgaaacaaacacaaaaaaacactttgaagactttgaagtttgacaggtatgattacctatctagtgattctcagcgaggtaaaaaaatgaaaacagactttataagtttaagtaatttaaaagcggccgcttttacaaatcaaactctgaatgtaaagaaacaaaaaaacgaggtaggggccaaagacatttccggagatgacattgccattgtcggtttatcatgcagaatcggcgaagccaatcacgtaaatgaatattgggatttacttttacgaggaaaagagttcatcagagacattccgctgaacagaaaaaaagatgctgaccagtcattaaaaaacagcggaaccaagtacagtaaagatgcagcctatacaaaaatagcctatatggatgagattgataaatttgattgtgactttttcagtatccttccaaatgaagcaaagttgattgatcccagacaaagattatttattgaaacggcctggaacgcattggaagacgggggttacggcggcggaaaattatgtgggacaaatacgggagtatacattggactcagcagtgacggctcaaatgaatacttcagattgcttgaaaaaggagatcaatcgttactcggactggctaccgcgggtaacattaaatcagttatcgcaagcagactgtcatatatcttggattttaaagggccagcaatggtaatcgatactgcatgctcttcatcacttgtcgccctccatacggcttgtcaggcaataagaaataaggattgcgatatggcattagccggcggagtgaatataaaagtattcccaaagacaatagaggagagcaggttaaatatcgggaattcttcatctgattttgctgtaaggactttcgatgattcagctgacggcacgaatagcggcgaaggagtcgctgccgtattgctgaagccgctggcccaagcgattcgtgatcatgaccagatctatgcagtcattaaggggagcgctgttaaccaggacggcagctcagtaggaattaccgctcctaacgcagcagctcaagaacaagtaatagtagatgcgtggaaaaatgcaaaaatagatcctaaaacaattacatatattgaagctcatgggacagggaccaaattaggggatccgattgaaataaatgcgttgcaacgggctttcagaaaatatacagaccgaaaacagttctgtgccgtatcttcagtcaaaacaaacatcgggcatcttgatagtttggcgggaatagcgggtttaattaaagcggtaatggcattaaagcataaaaaaattccgccaagtttacattttaaagtgccgaaccgaaatatcaattttcatgaatcgcctgtttacgtcaatgactccgtttcagcatgggagagcagcggagtatacaggtgcggcatcagcagttttgggctgagcggtacaaactgtcatgtcattttagaagaggcacccgcagttgaaaaagtcgatcaatccgttttatctgaacatatttttactgtttcagctaggactaaaacatcactcgcgcacttgcttacagatcatattgattatttaaagagagaaacagatgtgaatctgggagatatatgttatacagcaaacactgggagattgccaaacaaatacagaatcgctatggtaataagctctgtcgcggaactgctgaaaaagctggagtttttatcatgctctgaatggaaaacgtatcgggagaaaaatatatactttcaatcgataacaaatcaaacaaagtttataggaaaaacgcatacagacagtgtgcagaatactcaaacaataaaaaatgtgattcaaagagtcagacaaaacgtctctaatatttcaacctctgactcacatattttatgtgaaatgtattgtgatggggcgaatatcaactttgaagatctttatagcgagatgaattttcaaaaggtcagcttgccgacatacaaattcagcggaaaaagattatgggctgagccggctgcagacggcccttcagccgatgagaaaaaacaatctttattgagcaatcttgcagtgcagtcactgaatctggaagtgtatatatcccatttgaatgtcactgattattggtttttaaatgaacataaagtgaatgattcttacgttatccctggaacggtttatatagaaacagctagagaagcgggaagaaaatacttcggcgcacctttcggcattctgttaaaagacgttacgttttcaaatcagttaaaggtaaaagcaaatgaagttaaagaagttcatacgatcataaagaaaaaggacagcgttttagagtttagtgtgataagtaagtccggcgataaatggataaagcacgcggaagcggtcattgcgaaagaagaaccggtacgggaaacatatgacattgaggatttaaagaaaagcttcaatgctgtctatgccattcaacgtaataatcatccattgacagaaataaacaccgatgaatacaagtcggtttatcatatagaagataccaatagaccggaaagcatcgttcaagtcggaggcagatggaaatgcaccaatgcaatctacagagacgacgacaggcttctatgtgaattggaattgccgaaagaatatgagagtgatttcgttcagttttcgcttcatcctgcgatgatggattgtgccgttaatgccgggacattcacgatagataacgaaacctatctcccttatttttataaagaatttaagatttatggctccgcttctaaaaagttttacagttatatcaagaaaaagagccgaagcaacggagaaacaggaacgtttcgcatcgtcctgctgaatgagactggagaagtattcggtgaaataaacaattacatcgtaaaaagggtgcataaagcagctgaaaagactaaaaggaacaatatatatcataagctatcttggataagagaaagcgatcaatcacacgagatgcgagaaattcatcatcctattttattatttaagaataatggctgcagtttatccgaggaaatcattcgaagcttagaactggaagggaaaactgtgattgtcgcggaacagggtgactatttctctaaaatcggaagccatcattatacagtcagtgattctcaagaagattatgactgtcttgtaaaaactcttcaaagtgaaaaggtttctcagattgtccatttgatgtctatcagcgatgagaaagacaaaaacatatatcagcttcagaaaaaaatatcctcaggggtagacagtttattttatttaacaaaatcacttgtagaaaatacaaaaaataacatagaactgatgctgtttgcagaccttgcacatcaagtaagcggtgaagaaccagacattaacccgcataacgcggcatttttcggttttggaaaagtaattgaaaaggaatattcgcgtgtaagtgtcagatgcatagatttggatcaaaatcttatggcggaaaacatcatgtttgaaatcaactcaaaaaaacagtcagagcttgtcgcttacagagaccggcataaatacgttcaagagctccagactgaagacttatccgtaattcgggaagggaaaataagcatcagaaagaacggtgtatatgttattaccggcggtatgggcggactgggattagaaatggccaagtatttatcatcaaaagaaaatgtccaattaatcctcattggacgctccgagcagcagatcaacatggagaagggaaacaaaaagaaaatcgatgctctaaaagaaataaaagaaagcggttctaaggtagattactataaggccgatgtcgcaaatgaaagtgaaatgattcatgtattcgaggaaataaagagtaaatacaatacaatccacggtgtcatacatagtgctggtgtttctggagatgggtttattttcagaaaggaaaaaaaagtgtttgataacgtgctcagaccgaaagttaatggaacatggatattaaacgagctgacaaagcatgagcatctggatttcttcataatgttttcttctatcacagcacttgcggggagtatggggcaggctgattatactgcggctaatgcctacctggattccttcgcagaacgcagacagcgaagaagaccggatgaaaaaacagttacgattaattggtgcggctggtctgatgtgggtatgcttgccgaatatattgaagagcgtcaaaaggccggaaacgaacataaagatgaaaacggctttaagacgattacctcagctgaagcgatacgtgccttcgatgaagtcatgcaaaaggacatccggaatgtgatcatcggggaaattgatcatcgggtactggaattaaatcaagatcaaattcagttccgattatccccggatattttgacttttaaggagcaggcgattgtaaaaaaatctgttgagtcgaaaactgatcagacattttgcttcagcgatattgaaaataaactaatgaaagcttggataaaagttttaggcttagaacaaatcagtataactgataaattttatgatttgggcggagattcaatatccgcgatatatctggtaaaagaaatagagaaagaatggccttctctcattgatgtttctgatatttttacgtatccctccattaaggagatgtcaacctaccttgaatcccacttcagtgatcagaagtcttctgaccgaatccctgaagaagacaatgaagatgacctggatgcaattttgaataagctggcatccggagagatggaagtcagcgaagcaaatcaaatatttcatccagaccgaaaataactgaattgggcctgtaaaaatatattcgcaaaatgaaatattggcaggctgcgaatggaatgaagaaaaagcagcctgcctatcacattattatgggaactgaattccattttaaggtaaaattgtagatcttattacccttcctatcaaaaattttcttagaaagaaagcgggagtgatccgtaatgaatagcgttcaatcttatatatttgaacaagtgaaacagcataagctaagccagaaagaagcaaagcgaatgctaaaagaattaaaggctgcaagcagcaatgaagatattgctatcattggaatttcctgcaaactgccgaaagcaaacaatacagatgaatactggcagaatctgatgaatggagaagactgcaaagcggaatatccaaaagatatgatcaattacattaaaccgatcgtaaacaataaagggtttactgattttctcggttcaggatatctgacggaagaacaagcagataactggaaacctggcggatatttagaagacgtagacaagttcgatcctgaattttttaatatttctcctaaagaagcaaaggccattgacccgtctcatagagtattgctggagacggtatggactgcgattgaagatgcagggtatgcaggggacaaaatttatggaagcaacacatcgctctttgttggaaaagaccatgtcaataatacgttgtaccgctacattacagaatcagaatcgacaagtatgacgggcaactggccgggtttgatggcggggcggattaattatttattaaatttaaaaggaagttctatggttttggattctgcttgcagctcggggctgcttggtgtgcatcttgcctgtaatgctttgaaaaataaagaatgcgatatgtctattgtcagcggaatttcattaggattctttccgcgcttcaaaacgtccaaaaaatcaatgatggaatcagtaagtgataaagtacactcatttgataaagacgcagacgggacatttttcagtgacggagtagcggcagtcatcttaaaacctttaagtaaagccaagcaggacggagatcatatttatgctgttatcaaagggagtgcagttaataatgacggggcctcaaacggattgacagctccaaatgccatcgcccaggaagaagtactggttcaggcatgggaaaatgctcaaattgatcccgaaaccattcaatatatcgaagcgcacggtacaggcacaaagcttggagatccaattgaaataaaggggatttccaatgcgttttcaaaatatacggacaagctgcagttttgcgggatcggatctgttaaatctaatattggccataccgttgccgtttcgggtttggcgtcacttatcaagatcgttctgtctatgaagcatcaagtcatccctccgagtattaattttaaagaaccgaattcattgattaactttgtgaagtcacctgtatttgttacagacaaagcccatgaatggcctaaaaataactcaccgaggagagcgggaatcagttctttcggctttgtggggaccaattcacatgtagtgattgaagatgctggagatgaggttgaagaggtcattcctgcaaatgaaacatttgagatatttactttatcagctaaaacagagaattctttaatgaaactcatcaaggaatataatgaattctttaaaaaaggaactcaaaaaaacgtaaaacacatttgctatacggcaaacacagggcggggccattacggctaccgattggctctgattgtaaaaagttacgaagaattaaagagaaaaatcggcaggcttgcaggacaaaacctgaatgaaatatcagaaaaaggcgtatatttttctttccataaagttggttctgatagaaaacagattatggatgaaggagaaatttccttatctgaacatcgaaaaatgaatgctcaatctgacaatttgatacatgacattcttactgaaggggatgaatatttactgctaaaccttacggaaatttgcaacctgtatatcagaggagcaaaagtagaatggacaaaaatgtacaaggatgagcacagaaagattgtcagtcttccgacataccaatttgaaagaacattatgctggggagaagtaaaggacagaagaggtgaagcgccgcatcagaaaaatatcagtcacccgctgattgaccagtgtttggctgattcaatgaatgagacgatttattcaacgacatttaatgtgaataaggattgggttttaagtgaccataaaatcatgggggcttgtgttattccggggacgacttatatcgaaatgggaagaagagcaagtgccgcttactataaaagcaatcaattagaattacgagatattatcttcttcactccgttaacggtaaatgaggatgagaataaggttgtacacacaatcattaagaaaaagaaagaatgtattcaatttataatagccagtcaggaaggagaaacctggattacacatgcagaaggaaaagcgtttccattaacagactctgtatcaatgtttgatttacactctgttaggaatgacagtaacagagagaagataaaagtcaattatgaaaataaaaatggtttaatcagcaaagtctttactttcggaccgaggtggctgaacttcaaagaagtcatactgggccctgatgaacagttggccgaattaaaattggctgatgaatttacagcagatttaaaagacgtctttttacatcccgctttgctagataatgcggtgaacgtgtttattggagaagatgatgacgatagtacattccttcctttttcatataaaagtgtgaagatttactcaagaatgccgcagcatttttatgcatttgtcaaaaagaacgcaagcagcaaagagacaaagctgtgtgatattcagttaatagatacagaaggacatgtttttgcagaaatcaccgattatgtattaaaaaaagtaaatcggattaatgccctttttgaagaaagttctgaatcactttatcaattaaaatggatggcgcaagaagcttttgaagaagaaaaaacagaggtaacaggtcctgtactgttatttaaagacaacatggaaatttataaatctatactggaacagttgaaaattcgtgacgatgatgttattgaagtggagtttggggatgaatttcagaagataaatgggcggaaatttctaattagcggatcagaagaagactatgttcaattattgcatagcataaacgatcaaaatatcagcagcattatacatatgtcttctatcagccgccaaggaacggaatcattaacagatttagaagacatgcagaataaaggcgtatacagcctgttccgcttagtccgggggttaagtaagaataagatgaaaagcaatattaatttgcatcttatttctgatcttgtgacagaagtgtcaggagaagaaaatacaatcaatccattgggcgccgcgttgtttggtctgggacgtgttatttcgcaggagttccaaaatgtttcatgtaaagcaattgatattgatgaacatacttcaccggaaattattagtgaggagttaagaacaaaagggaaacactatcaagtcgcctttagggatggtaagcggtatatcagtcggttggatacggttgaaccaataaagaataagaaacacggcggtttggaaattaaagaaaacggtgtctatatgattaccggcggcaccggcggaatcggtttggagatcgcaaagcacctggctggaaaacataacgtcaatgctgtattgctcaatcgctctaaactgcctgatcaaagccgatgggacgacatcattgctgatggaacggatttaaagctttgcagaaaactgaagtccatcagagctatcgagtcaatgggttctaaagttgattgctacagctgtgaagtttctgacttaaacagcatggggccggtaattgaagaaataaaacagaaatacggtacgatcaatggcgtgttccattgtgccggagttgccggggacggtttcctctttagaaaagaagctaatatttttaaagaagtgctcgctcctaaaattaatggaacatgggttatcaatcatttaacgagagacgtagatttagatttcacgattttgttctcctcaattaattctattttcggaggtgccggacagggagattatacagctgcaaatgcttatttagattcctttgcttatatgcaaaacaaacagggaaaaaacacgctgtcaattaactggccggcttgggatgaggtcggcatagctgtcgattatggaattactgatgagagttctattttcagattattgacggtagaaagggctatttccgttttagaagaaatagcatcgaataagcttactaatatcattccaggtacattaaatatgaagctcctcgcttttgcaaaggatgaattgtcttttgaattatctgagcaaatcaaaaacaaattaatagataaaaacaggacaaaaaacgaagcagaaaaacgtcgaagaacagatactgaagatatagtgctcaaaggaaagggagaactttactccgataccgaaaaaagtattgcgcaaatgtactctatggttttggatatgcaagagctagatttatatgaaagctttagtgccatgggcggcgattctattatggcaacccaactgttaaaactgattaatcaacaatatcctgacattgtggatatatccgatatatttacatattcctctgtagtggagctatcagagtatattgacaagcagctgaataaagattcacagcaagaaacggaagaagatactgctgaaaatcggcttgagcaagaactcaacaatctatttgacgacctggagaacggcaaaatcaatatacaagaaggattgaaaattctagaaaactagttacggaaaaggggaaaaataatgaagaatacggaagaaaacaagactgcaatcataatcggaggcggtattgcaggaatggccgcgggctgttacttgcaaatgaacggatacagcacgaaaatctttgaaatgggtttgctgccgggtggtttatgtaccggctggaagagaaaagggtacttttttgacggttgtatcagctggctggtcggttcaggacctaacaatacgttccataaattttggaaagaactgaacgtaatacaaaatatggaattcattaatgatgaagaatttgcggttgttaactttagaaatggtgatacatttacgctgtatgctgatgtagataaattagaacaggagtttttaagagttgcacctgaagatgcggaaacaattaagcttttaactgatggcattcgagttgtttctgatgtagagctggatttggataaagcgcccgaactgttcgatttagcagactttgaggccttcaaagcaaaggctggcccttacatgaaagtaatggggcaatggggaaaagtgacgatcaaagaattcgcccagcgctttaaaagcagttttgtaagagagaatgtaaatcgtctgttttggtttaatgtagatacccctatatcttactttatggctactttaggctgggctaatagcaaatcttcaggacatcctgtagaaggttctctgcaattcgcaaaaattattgaagccagatatgttgaattaggcggtgagattcaatataaatcacctgtttctaaggttttagtagaaaatgataaagcgatcggaatagagttgaaaaacgggcagtgtcattatggagatatcgtcatttcagcagcggatggctataaaactatttttgaaatgctggatggaaaatatacagatgatgaactgacattttgttatgacaaccttaaaacaagtgcaccgcaaatttatgtcggattgggcgtatcaaaaacgtttgaaaaatatcctcattatttgagcctggaattagaacagcctcttaatagctatggctgtgacaacgttaaaaacatatttgtgaaaatatataacgaaaatccttccttcgcacctgatggcaaaacgagtattatcgtgtatgcgaaaacttctgctgaatactgggagactttgcaaaaaaacaaccgcgaaaaatatgaagaagagaaaaaagcaattgcgaatgtaatgattgatgaattagacaaatggtttggtgaaattaaatcaaatattgacgtgactgatgtatccaccccatatacgatcagaagatacacaaataatagaaatggaagctggcagggctgggaaaaacagatggaaggcatcatacacgagaaaaaactgaaacgttcacttcccggacttaaagacttttatatggttgggcattggagtcaagtgggaggaggtcttccgagtgttgtcttacaggcaagaaatctagtgcaggtgttatgtaaagaagatggaaaggtttttgagacaaaaattaactaattcaataagctgcttcttcaattgaagcagctattctatatatccatgatgcttctcatattttatatagaatcaaaatcgataggggtgattaatcgtggatgatatttcgattataaaacaatatgtattggagcaagtaaaagagcaaaaaatgaacagggaaatggctttgcgcattttgaaaggattatcagataagtctaagaaaaatcaatgtgatattgccattatcggcatatcctgccgtttctcaaaagccaataatgcaaaagaatactggcaaaacattatgaaccgtgcctcatgcatccgggacttaccgaagaagcggcggaaagatattgatccattgctgcccagtgcgaatgagaattcttattttaaagcgggtttcttagatgaaattgataagtttgattcatcatttttcagaatttcgccaagagaagccatgcttatggatccgaaacaaagattgtttttggagacagtttatcacgctattgaagactccggttatgctgggaacaagttacaaggttcgaatacaggtattttcgttggacatgatcatagcggtgacttgaagttttcctatgcttccctagtaaatgatgcggatatgattgcaatgacaggtacttatcccggcatattggcaagcaggacctcctacatttttaatctgaaagggccaagcttggttgttgatacagcctgctcttccggactcgtttcggttcatcttgcttgtgaggcacttaaaaatgaagaatgcagcatggctattgcgggaggcgttaatttatttctgagacctgaaaatataggtacgatgagcgaaatagaagcggaaaacgctaaaatcagcatttttgataaaaatgcaaaggggacagcatggggtgaggggatttctgctattgtattaaaacctttacatagggctatagaagacagagaccacatatatgctgtcattaaagggagcgctacgaataatgacggggcttctaacggaatcaccgctcctaatgctgaatcacaagagaaattgattacgcgtgcctggaagaatgcgaatattagtccggaaactatttcttatattgaaacgcatggaacaggcacgattttgggagacccgattgagatcaaagggataacgaatgcgtttaagaaatataccgataaaaagcagttttgcggtataggttcagtcaaacccaatatcggccatacagtcggggcatcaggcatggcgtctctcattaaagcatgcatggctttaaaagagaaggtcatccccccaagtatcaactttaatgaaccgaatcctttaattaatttttcgaattcacctgtttatgtgaatgacatgataagaaattgggaaaaaggagagacgccaagaagagccggtgtaagttcgtttggcttcagcggaaccaactgtcatattgtattggaagaagcacctggaataataggtgagactgaacagagacaggtaaaagaggtattcactctgtctgcaaaaaataagtccgtcctgaatgatattgcatcaaagtatcttcattttatctcggaagaaaacaatttgaatctctctgatctttgttatacagcgaatacgggaagaaaacatctggagaatagagtgtgttttctcgtaaaagacatcgaagatctgaaggaaaaacttgaaagtctgctcgaagcgccggttcagcaagaagaagctgcattttcttttaagaccgatagagatctaagtaccgctgctggaaaaaaacttaaggcttataatgcaggcgggagaacagatgagagtcttctgattgatataagcaagctctatgaaaaaggtgcagagatcgattgggaaatgatatatgaaggagaaaaaagaagaaaaatcagcttgccgggttacgcatttttgcgggagagacattgggtgaaactgcctgaaaaattaccgataagcaatgcactagataacccctcagtcaacaagcctcaaataataagactgagtggcagggaagacggctgttattcagaaacagagctaatggcaggacaaatttggggaaatgcccttggaatcaatccgatcgatgttacatccgatttttatgaaatgggcggagattcaatcatagcaatagaaatcatcaactttatcaataaacagcaaggaacggagctttcagtttcagacttgctaaagcattcgaatataaaactcttctcagcttatttggatgaatattctctgaggaagacaaatgatgtgaatgtgattcccaaagcgggcgattttgagtggtatgaggcatcatctgcacagaaaagaatttttattctagatcaattaaataaaaacagcacttcttataatatcccgttctttttaatgattgaaggagagttggacgataaacgtttagaagatgcgtttaaaaaattaataatcaggcatgaggttttaagaacgtccatagttttaagagacgggcagcttgtgcaaaacatagaaaaagacgttcgatttaaaatggatagaatcaagacctccgacgaagaattagagagccttatggctaattttgtccgcccgtttgatgtagaaaaggctcctttactgcgtgcaggattagccgagattagtcatcaaaaacatcttttaatgatagatttacagcatattatagcggatggggcgtctatcccgatcctccaaagggaattgataaatttatacgaaggcaacgaactgccgccattgaacgttcaatttaaggattttgcgaaatggcaaaatgaattatttcatactgaagaaatgaaaaaacaaaaagacttttggttaaatgagtttaaaggagaaattcccgctctcaatctgcccgcagatttttcaagagaagccaaacgagatgatcaaggtgaacgaatctatttttatgcaggaagagagctgaccgccaagttaaaagaattaaacgcaaaacaaaaagtcacccttttcatgactttaatggcttcatttaatgtgctgctccataaacttactggtcaagaagatattgttatcggcacacctgtagccggaagaaagcataaagaattagaaaacatgataggaatgtttgtaaatacgctggcactgagaaataaaccatctgccgacaaaacattcaaagaactgcttgaagccgttagggataatgcgcttctggcttatgaaaatcaagattatccttttgaagagcttgtagaccatttgaaccttgagagggatataaaccagaatgctcttttcaacgttatgtttgtccttcagctgatggataatccggcaattgaagtaaatgggctgaaatataagccgtatccttacgaaaacaaaacagccaaatttgatcttttgcttcaagcatttccttcaaaagaggacatcaagtttgagttcacttattcatcaaacttgtttaagcgcacaactgtagaaaaattctcacagcgattcttaatgattctcaatcatattgttgaaagtcaaaatggactaatcggtgagattaacattttagaagaaaatgaacgacgcgatatgttgagttacagtggaaaatcactgagaagcagaggcacagatgcatctatctgtgagctttttgagaagcaggcggaagcaacgccgaatcaaatagctgtgtctgcacaagacggaagcttaacttatagtgagctgaacaaaaatgcaaaccggcttggaagagcactcattcaaaaaggtatcaaaaagaatgaagcagtgggcatagctgcagaccgaaccactgattttatcatcggagtaatgggaattttaaaagcgggagcagcttatctgccaattgatccatcatatccgcaagaaagagttgagtatatgctcaaagacagcggggcccgcttgttactgacggatcgtaacaatcattgtcaaaggtacggagtagaaagtgtttgtctgaatgaattggaaacagttccagacgacgggagaaatgttaaaggaggagcggaacggcacagccttgcctatatcatctacacttctggatcaacgggacacccaaaaggtgtgatgatcgaacataaaagtatagtgaatttaacagaagccctgcatgaacgtatctactgcaaacatggcgggcggcagaatgtagcgttgttggcacccttttcctttgacgcttctgtcaaacagattttttctgcgctgcttttgggacactctctttacatcatctctgaagaagccaggcatgatatcacgaaacttgctgagttctatatccaaaataaaataaatatttctgatggaacaccagcctatctcagcctgctctctgagtctccgcagtgtggccgtataggtgtaaaacattttattataggcggcgaagtgcttaaacctgaagaagtaaagcgtttttataaagtatttaagaagaatgaccgtccttatataacaaatgtatatggaccgacggaatgctgtgttgatgctgcatcttatacgataaacccagataatatttccaatataaagaggatccctatcggcacgccgataaaaaactgttctatctacatactagataaacagcagaagcctgtgccgccgggagttatcggagagttatacatcggaggggaaggagttggacggggttattgcaatcgtgaagaactaaccgaggctaagtttatcccggatcttgttcattctggtgagaaaatgtataaaaccggagatttaggcaagtggaatgaggatgggaatatagaatttgccggaagaatcgatcgtcaagtaaaaatcagaggatttagaattgaactggatgagattgtaaacagactgctgtctcaccaaaatgttcaagaagcggttgcgattgctcacaatgatcagatatatgcctatacagtatgtaaagatacgcagccgccttctcagctaaaagaatacttattggaatatctgccggaatatatggtcccgacagtcattatgggcatagataaaattccgttgacgaacaatgggaagactgatgtaaaacgtttgccgctaccagctgaaaataatgccgagctgcatcactttattgctccgagaaacgagattgaacgaatcgtcagtgaggtctggtccgacattcttgaagtttctaaaatcagtataaaagataattttttcgttttaggcggagactcaattaaagccatacaagcagcggtcagaatggaaaaattcaatcttaggctggaagtgaaagacatttttcattaccagacaatcgaaggagtttcgaataaagtcagttatataacagcggcatctgataacagtgtgataacgggggaagccggtcttgtgccaattcaatgctggctggctgaacgccataatgatactctgcaccatcggaatctttcttttatgctatacagggaagccgggtttggcgaagatattgtaaaagacattttcacccggattattcagcatcatgacagtctgagaacagtattcaaacgtaaaggcgatagaatggtacaggtaataagaggcctgacggacggcgacttgtttgactttcatctgatcaatgcaataaacatgccgcaatcagttttaaaaatgaaaataaatcaaatacaagccagtatggatctgactcacggaccgcttgttaaattggcacttattaaggaagcagatggggaacatctgttaatcgtcattcaccaaatgataattgatcatatgtcttggagaatactgcttgaagattttaatacagcatatcagcaagttaaaagtaacgaagacattgtattaccaaataaaaccgattcgtatttaaaatggtctgattatctctataaatatgctgaaagtgaacggctgttgtttgagaaagagtattggacgaaactcgaaaatgtttatgctccgtctattccggttgatattcaggagcaaattgccaaagtcaaagataacagacaagtgtacaggcagtttaatgttcgggaaactgaaaatataatgaatgcgattcaaggacaagatcatttcactattgagactgttttgctcacagcgttaggtttgacaataaaacatcaaacaggcagtaatacatctctcgtgcacttaggcaaccatggccgcactcatcagagtgagaagcttaatatctacagaacagtaggcagattttctgcaatctatccagtggctttggaggtctccgattcagatcatatcggttcgagtttagataatgttaactcgaccttagcaaatattcctgatcaagggataggatatggtattttaagatatttaaaacaagatataaaagagaaatcaaaaccagacatttcatttaattatatgggcgaatttgataatgaactgcacacagaaagctttacggtatctccgctttcaaccgggaatgatataagtgaagatgaaatttggaattacaagtttaagtttattgtgttggtaagagagaaaaaattgagcattggaattgaatataatcaaaatcagtaccataagagtactgtagaaaatctgcttaatcagtatatgcattatatcaaaaaagcagcagaaaccatttaattaatcggaggttaacgtaaatgaccaattcagttcagcaagataaacaagtaccgaagaaatatcctcaggccgcagtcatgcaaatggtttcagggctggggttttccctggcagttaaaacagcggtagaattagatgtattttccgcttttcaaaatggaccagcttcagcggaagcgatagctgaagcccttgaattgaacccctctgccttattcaggctcttaagagcgctggaatccgtcggtttggtcgcccaagctcaaaatggctattatgatgtaacagagtatggtgccactttgatgcctgggaaagcaaaatccattgagcctttggtagaatatctgctgcatgaaacagtagtgcagtctatgtttaaaatggattatagtatcaaaaccggcaaatccgcttttgaagccatttatggcgataaatggtatgagaataatagtcttgatcaagattacttaaaaacaatggataaggcgatggagatttattcaaaaatgagtctgccatccatattgaaagcttactcatttgaaaagtttgatgttatcgtagacgtcgcgggaggaatgggccagttaataacaggcattttaggtgctgctcctaaatcaaaggggatattgtttgatcttccaaaaacgatacaaagtgcaaaaaagcatttagcatcttcagagatgagcgaacgctgtcagtttacggaagggagtatgtttgaggaaattccttccgggggagacttgtatgtgataagcaaagtgttaaatgattgggatgatgagcatgtggttgctattcttgaaaatatagccggtgccatgtctgatcattccaagctgattatagttgaaaatgtgcctgaagcagacaagctgtcccctgaagaagcttttcgtgatttattatttttagtatgctctgcaggcggcagagtcagaaagaaaaccgagtttgaacaattgattgagaaagccggattaacactattaaatgtaattcagaccccgagtaaatacacaattttggagtgtggaaagaaataatgttatataagctatctctttaggagatagctttttttatataaaaagttcaccaatttgactgattgattctgtctatctattgatttttctgataaaataaaacttataatatttaacataattataaatttgaaccatcagggaggaagaaacatgaaaaagagactcgttatgctattcgcggcggccgccgctgttttgttgcttgtgagcgggttgtgggcttcatcagcgtctgcggcgccggctcctgctttaacacaaatccgtattatcggtgtgacgtctgacggtcagagttaccaatgggaaaatatcgggccgaaccaaatcagcgcatcaaaaccgatgaagggtacaacgggttatttagccgtatatttccaagggtatccgaacaataacacgatccaggcgtttaacaacggaacgaatattacaaatcttacgtcaaaagcgcttgaagatgaatatacaaaaaacggcaatatcgttacaggctatattaaatattacagtgttcctctttcttatgtcagttcaggaacgttctctttctccgcaacggggctgaacgggccgtacacgccgttaagcagcggatttttctccattcaggtacagagttaagacggtagcctggtgctttcatgtatagtttttctctctttccgggaagctattcctatagaaaagggagggcttacatgatggacaggacactcagatatttgcgcgagtcgctttcgaaccacttggagcatgatgtgtgccgagggatttataaaaagcttcaggtgaagcattatgaaaatgagggcgagtttgtgaaagacctaaatgatttggaaatggatgcgctgaatcaggtgcttgaaaaggaaatcaaatatgctgagaacgagcaggatgagaagcgcacgatggaattgaatgaagtatatgagctcctgttttaaaaagcctcccggcggtcgggaggctttttattgtttcagaaacagtttacagaatcatccaaccctttgtataatggatagttgtgaaaaacacagacggaggagaaacatgaacgaattaaaaaaacagacggttcttgagttgtcatcggttgaaaaagctttggtttttctggtgccgccattattggggctggtcatcggatggtttctgccggtcattgcgaagtgggccgtaacattggattggctgcctgttatcgggccgctggaaatgatcgcttcttttcacggatggaaggctgcggctgtcatcgccgttatcggcttaatcgggggagtgtggctgacgcggactgtttttaaagaatgtcttacggcggtcgtgacggacagcgaggtgtccttaaccatatataatgaagaaagcgtgttttcgaaagacagcatttccggtgtgtttacggatgagaagcatcttgtcttattaggcactgaaggacaggagctttttcgggagaagcttgagccggcggttgaaaaagcggctgatgcgtttcgcgcgcatgggtatgtctggctggggacggaagatccttttaaagaagaatacaaacggtgggtgccggacacgccggatttggagccaggggcaaatgctcttttaaaagcgagagaaaaggcgctgaaagaggaggaaaaggctgatgcgaaagaactgaaagcggaaatatccaaactgggcattaccgtgcgggataaaggctcgcgccaatattggcggttctatcaaacgccgtctgcataaaaaagctgccgccgtttgatacggccgggcagcccgggaacagattatttcttcttgtcatcataatattgaaccgggtacatggagccttcggataccattttgttatcttcaatatcttcgggatgcgggttgcctgctttgttgacggggaatgattcaatatcctgcttcccggagagcgatgttttcatattgcggataaagttcatcaccttttggcggtttgatttatctttgagcaggtaggaagtcactccgacagtcgacacggcaagtcctgaaatgagcagtttttgtttcacgataaaaactcctttctatttctggcttgcagtagttattcccgcttaacggctgtttaaacatcggaagggtaattttggctttctgctttaatgcgataaagattgacaaaactattttcagaataatattataaatatatgatagcgctggagtcatattttaattgaaaggtgttaactttatgaatcaattacatcgcagaatgggaacgtttgcactcatgatggtcggacttgggtcgatgattggctccggctggttattcggggcgtggcgggcggctcagattgcgggacctgccgcaattatttcctggattatcggtatgatcgttattttgtttatcgcactttcttacagtgaattgggttcaatgttcccggaagccgggggaatggtaaaatatactcaatattctcatggatcatttattggatttatcgcaggatgggcaaactggattgcgattgtttccgttattccggtggaagcggttgcgtctgttcaatacatgagctcatggccgtgggaatgggcaaaatggacaagcaatctcgttcacaacggcactcttacgggagaggggctcggcttcgcatccgtattactgattatttactttttactgaattattggacagttaacttattttcaaaagcgaattcattgattaccatctttaaaattattattccggggctgacaatcggagcgctgctgtttaccggttttcacggcggaaacttcacatccggttcaagcattgcgccgaacggctgggcgagcgtgctgacggcggtggccacatcaggtatcgtatttgcgtttaacgggtttcaaagcccgattaacatggccggagaagcaaaaaatcccggcaaatcgattccgattgcggttgtcggttcgctgctggtcgcaaccgtcatttacgtcctattgcaaatcgcatttatcggtgcggttgaaccttccatgattgttcacggctggagtcacctgaacttcaactctccatttgccgatttggcgatcgcattgaatatcaactggcttgtcattattctttatgcggatgcgttcgtatctccgtcaggaacgggtatcacatataccgccacgacgtcacgcatgatttacggcatggaaaaaaataaatatatgccgagcattttcggaaagcttcatccgctgtacggcgtgccgcgccaagcgatgattttcaacctgatcgtatcgtttatctttctgtttttattcagaggatggggcgtgcttgctgaaatcatttccgttgcgacgctgatttcttatatcacgggtcccgtgacggtgatgacgctgcggcggacggcggcggatttgtacaggcctctccgtctgaaaggtctcagcgtggtggcaccgctcggcttcgtgttcgcgtctctcgtgctgtattgggcgcgctggccgttaacagggcaggtgctgtttatcattttgatcggccttccgatttatttctactaccaagcgaaagcgaagtggaaaggattccgcagaaactttaaaggcggcgtctggatggttgtctatctgctcagcatgatggtcatttcatggctcggaagtgaaaaattcggcggtctgaacatcattccgtacggctgggatatggggctgatcgcaatcgttgcccttgccttctatgcgtgggccctgaagagcggattcaagactgagtatttgaaagacgccaaagcaatcaacgatcaattaaaaggcggacaggcggaagccgctgccggaaaagaataatgattgataaaaaccttgcggtaacgttcccgcaaggttttttgatcgggcaaaaaaacatgggttcgatacagacgtgacgatgaatgagaaagcctaacgacaggcaaccacggacagtattctttttttctcatgatttctccgccttatcaataactgtcttccatattaaacaatgaatgtaaaagatatgttgggcaacttctttcttctccgtaacttcatccgttttcctgtacttcaagtcaaagttttagcgacaaaacaaataattaatcatagagaaaatacagtacgtaagttgcgtttgaaataattgtataataaattaaaatatgggaaagtaaatagttggggataataagtatgaaaatgcgaagatttttttgcaacattatgcatcgttactcccttagtatttggaggttttacgagtgttaaggctgtggactcgtataattcagaaacagtaaactacatattgaaaatgaatccgaatctgtcgaaaaaagaattaattgaatccgttaataatttagttaaacaagataataaaacatctaatgagatcttagaggaaattaaaactgaattaaagaagcaagaaaagctagataaagaagataaaagtaatagaatgagcacaatgggcaagagtagcgggccgaaaattataggatcaagctctaaaggtaatgtttactatacacctgcatctacttttggacttccgcatggacatgtcggtatgtactataagggaaatcaaattgtcgaatcggtccctaaaaaaggtgttcgtgcaatagcttcatcgaaacataaggtcgaaaaaaacgctgtaattcaaaatgtgaaagtttctagttctaaaaaaaataattcagtaaattggggttacagcagggttgggaaggatggttattcatataattttgcaacaaatagaaaatcgagtcattatggtgataaaaactgttcaaaactattatggtcagcttttaagctaaaggctggtatagatatggataaagataaaggtatgggcgtctatccaagagacatcagagattccagttatacaaaaactattaaaacatttagatgaattattttcactccctaagtttatttaggaagtcatattattttaaggagagagattatatttgaacaagattaagtggcttattataattgcggtcatagtattaataggtatatttatatgtattggaacttttaaatatactaattcagtttctgacgttaaacaaactgaaaaagaaaaggaaaagtatttcttgaatgataaaattgcagctatatattattcagctacaatagattatcctaaagatgggagttatactgtatacattgatgaaaaaggagcaacaacagctgtaaaaggagatgctattgaggttggaaccattgcacaagatgaaaaaaacatagttagacaggacaaaaaagaagtttatatgataggcgataactttaaaaaattcccgatgcagcatcaagtacatacaagttatgggcaatcatcaggccatttaataaaagaaaatatcttttattttttgaataatcaaggagtcggtgaaaaccattataatagtttaattagatggggtaacggcagtggatttcatgaaaagattattccgggtttctatacaagtactggtaatgacggtgaatatatttacgtgataaatgaagattcttcaatcaaaacaccgacttttcagggtattaaaatagataaagataaagttacagtagggaaaggaacaacaattcctatattaaatgaagaaaattggagtgtttattcacaaataatagttaaaaaaagctcagccttttttatactatataaccaaacggataaatcaaacaaagtacaattcaaagtagcagaaattgatttagagcataaaaagtttaaaggggcatatcctttaggcagttataatatccctgatgaaatttctcaactggcaattcctctttccactaataacttttttgtgaaaaatgacactttatatcatttggcagctaattcaatactttatactttcgatttgaaaagtatgaagccgggaaaaaaaattccgttaaataggtcgacaaaatttgaaaaccaagcaaaattcacttattttgacgaatctaaaattttcttgttagaaataagcaagggtgggaaatatgtgattaattcttactcttataaaaacggaaaaaaattaaaatctactcctatcagaggacttgaaaaaattattaacaatacccatgtttctgaatatgacttttttatgattaagaaaaacaaagaagtatggagtggatagatacattttttaaatcgctagatagctgagtgagtatatttaaagggaaaaattaaattcacaaaggagaataataatggatgagctagatcttgcttttggtattttaccactttctattatcgtcttatcgattatattcacttatattttcaaaaaagtgtatataatgccgcttgtcagtatagttgtttcagtcatattaatgttcactgtttttaatctatccttctggggatgggtggttgtctatggtttagtatcacttgtattatcgtctattacaaatagtataagaaagaaaatagataatagaaataaataattatatccttttgtttgtaaggtatcataggtaattcacaattacagtgatacctttaattaatataaaggtgaatgtaagctttaataatatgctccgcccgctacataacccatgacggcgtttgcatgatcgggcaaaaaaatgggttcggcatcatctccgaacccatgtggctttatgatttgtattcttttttaaccttttggaatatatccgcatagttggtaaacacaccggttacgccccaattcagcagacggcgcatgtccgcctcgctgtttacggtgtaaggatgaagcagaaggccgtggctgcgaatgtttcggacattttgagcgttcagcgctttgtaatccggtccgattccgacggcatatgttttaatgtccgttaaatctgcgtcagtcattgacgtcatctgttccgcttcaagcaattggacagcgggaagtttcggatcgagctgtttgattttcagaaggctgtccctgctgaaagactgaatgataacttgtccaagtttcgcatgcttacctgccaatttgtattttttcagtgaagcgatcagtttttcttccatacccggatatgtttcgggcgcctttgtttcaatataatagtttgcatgtctgccgaaccgttttaacacgtcatcaagtgtgggaacgcgaagtccgacgtaattcggttttgctttttccggataggccttattgaaccaagagccggcgtcgagcttttgaatctcggctaatgtatgatccttcacccagccttgtccgtttgtggtacggtccagtttttcatcatgcatgacgatcagcttgccgtcttttgtcatttgtaaatccagctcaatatagtcagccttcattttttgcgcagtttcataagaaaggatcgtgtgctccgggacatatcccgaagcaccgcggtgggcaatggtcaaaattctgtcaggagacaagaggtttccttttcccgccgccgatacaggcgtgacgatgaatgacaataaaccgaatgaaagcaataccagagcaaacaatttatgtttccgcatgttttcttcccccttaaaaatcaatatctgtctctagcgtagaaaatcgttgtaaatgctgtactgcaaaaatattaatcttttatgttgttttcttacacatgctccgcccgcttgcccgtattccacgtcatagccaagaagacgatggacagcacgcatgaggagataagcatgataaagccgccgttccagtcaaagcggtctacgacataacccatgatggcgttggcgaaagcagagcctccgatgtagccgaaaaacccggttaagccggctgccgttcccgccgcttttttaggcgcaaggtcaatggcctgaagcccgatcagcatgacaggtccatagattaagaagccgatgctgatcagcgcgatattatcgatgagcggatgaccggcagggttaagccagtagaccaatacagcgataaatacgccggccatgaacagtacgcctgccggcgcgcggcggcttttgaaaaaccggtcgctgatccagccgcacaaaatcgttcccggaattcccgcatattcataaaggaaataagaccatctggaatcttcaggagagaaccctttcgcttccgtcaaataagtcggcgcccagtcaacgacaccgtaccgtacgaaataaacaaagacattggcaaatgcgatataccacagaaatttattattcagcacgtatttgaaaagaatttctttggtcgtcatctctttttcctggtctttgaacgcatgcttcggatagtcattccggtattcttcaatcggcggaagcccgcaggattgcggcgtgtcccgtacgagaagaacaatcacaaatgaaatgacgatggcgataatcgccggaaagaaaaacacgcttttccaagtaacaaacatggcgatgccgagagtcacgagcggggcgagaatacctccgcctatgttatgggcgacattccatatcgacattttcgtgccgcgttcactgatggaaaaccaatgagccatcgtccgtccgcaaggcggccagcccattccttgaaaccatccgttaataaacataaaaataaacataatcgtcacgcttgacgtgacccacggcatggaaacaaataaaatgtttacgacacctgacaaaaacagacccgtcgcaaggaaatacctcgggttgcagcggtcagacaccatccccataataaatttactgaagccgtaagcgattgatacggccgcaagcaccaagccaagttccccttttgaaaacccttgttcctgaaaataaggaatagcgaaggcaaagtttttgcgaagcaaataatacccggcatacccgatgaaaatccccaaaaatacttgcagcctgagccgtttataggccgcatccgtctttgaatcatccaatctctcaatatgcggagccggcttaaacaattgaaacatcatatcctcccctttgctgaacgtctatcatgatgtatgtatgactcctttccttgaaaatgacaaaaagaaccagaaatcacccttgtgaaagggcggggtttcctggttctcctcatctccatccaaaaatcattaacttgtgtatgatagcgctttcttaaattatcacagtctgacgtgaatgtaaacgctttaaggaaagttttcatttttttgaataaataaccggagggaaaatcagccggagcgcgaaagatttgaagtactcgattttgtactcaggcataagatgtgttaggccggactaagaaaagcgaagggagtgcatctgttgattgatgaattggattttgcgttcggtgttctgccgctttgtatcatcatcttgtcagtcgccggaacgtacctgtttaaaaacgcgttcattatgccggctgccgctttggccgtttgccttatatgcacctttaccgtattgaatttctcgtttatcgggtgggccgtcgtgtatacgcttgtctctttcgcgttatcgcatattacgatggtggtgatcagccaaaataaaaaataggatcggcggcagccgatccagctatcataagcagagatgcgctctctgctttgttttatttatgaatgtgcaggaattccttgatgaccgcggtctgttcttcttttggatagcttctgtacagatggctggttaagcggacggggtcaccgaagaagtaccgctcatagtgtgtctgtcttgttccaaaggggctcatggtcaaatcccatgcgaggcggaacacttttacccggtcctcagcgttcaattcggccgcctgcaaatattggtcaaggtctcctctgatgtcagaacggaacgctttttcagtcggcaaagtcaccattccgcttgccccgatcagctgaatgatttccgtgaagcgcgggtagatgtcgggaaaaatcgcgctgaccacacgaagcggagtgacactcggacgcatataaccccattcatctgtttccgcatcattctccgacttttccaaaagggctttcatcgtttccagaccggtgatgatttcagccatcttagcctgaatatgctgatattcgcccacatctatcgcttcgacaagcgtttgggcgaggcccaggagaaactccgtctttacaatttgtctcgtgatgacttgatgaaatgagaaggcgttaaaagagcttttcatattaaaatcaaaagccgcctcgtaattattataaaaaaatacgcgttcccaagggaccaaaacgtgatcaaatacaacgatagaatccatttcttcatatcttgagctgagcggataatcaaacgatgattttccgagtacgaaagattccctgcagatgaattttactccctttgtattggaagggattgaaaaagcgaacgcttcatccgattcaaaatacattttaggcagagaaaccacgagcacttcatccgtcaggccgccttgtgtggctaaaatccgggcgccgtgtatgatgaggcctttttcatttttatcgacgacttttgccgagataggtgtcggcgatacgtttacacccatttgtgaacgattcacctgaggggtgataaacgtgtgcgtaaaagaaagatcctgtgcagcagcgcgttcgtacagcgcttgaacatgttccggaaaacaatgctcgcggtctttcaaaagcgcggcggaggaggcgaagctcatcagcacggtattcatataatccgggcttcgtcccatcattccgtgcgtgtgtctggcccaatgttcgaacatgtttcttcttctttttacgtcttctttcgttttcggctgcaggtatgaaagcccggcccgttcttttttaccgggaagactgtaagtcatttgatctttcatatccggtttcgtttgcaaatcataaagagagcgcttcgtttccagaaggcccttaaatgcgggatgctcagaaatctgtccctcgatcttttcaccatcaagccaaatctcatttccaagctgatttaatcggtcaatgaacattttgccattaatgatacccatcatgtcgcccttctttctttgcggatccactacctcattatattgaaaacgaaattgggtgttccggttatttccaaaggagaagagccttttttgataaggggggtgaagggattgcataataaaaaaccccttaagcagaggggtttttaactgatcatgtctttgtatcgttgttcgaggacaaagtctatcattccggtgatacgggtgttttcagatttttgtctgaaacggtcagacacttggatttttcttgaaaacggaaatacagcaataacccaaacaaggccggccaggccgaaaaccatctgcagagccatttcaatcaaatcattaaaatgagtgctgaaaaaaaagatatataacgtgatgaatgtgactgtacatacgattttgacagtatgttggaaggtgaggggcggttcagtgaaacacattttcatttgattcagtgtgagcgaatcttgtttcattaagtatgtaagcagttcttcgtcattttgacttcgcggaatcaaatcggtttctattttttgaacggtgtccttgtatgtctgcatatcaatcttcatgcgaatcctcctttagaaataactccaagaatactcattgagcattcctggagcaaggagctgcctgttcaattatagaaatagtgataaaaccgtgctgaacaaggctgcagctcctcctaattcaggtgctaaaacgactaaagcaccgatccctacaataacaataattcctgcgcctgcaatagccatggtattcacgacagaatcccaatccggggagtacacctcttcggaatccggcaacctgaagctcttttgttttattttaaatgtaatggtagttgttagtccagttgtagcactgtcaccgaccggaatatcaggtgtataaattttaaattgaatattcagcgatcctgcagccggattgacatacacttctaaataaccgttgcggactgacaagctcagactgttaagcaggttttgataggaatcaatttgtgatgctgtaaaagagacttgtgaatctcccatcagaccggtaatataggctcccggtttgccatttgtaatggtaactgtgttgggagaaccttcgcttggcactgttgccaaaagtgaagtagataaaagaatatccatttcaggtgatgcataaatggtttctgtcttgtcgaattcaaacatggcattcgcaagattcgatatattttctaaagcaggaatggttgttaaaatatccgtcagtgtgcgcagtcttgcatcatacacaggatcagaaggcggatggacgctgcttgcacccgagtcttttccggagtatccgtctttgtcaatggcgacttttcccgctccgcttccgatcgtgccttcataaaattgatcaaaagcccagtttttcggcatcgggtatccgaggttgccgctgaatccggtcgacatgttagccgtaaagctatatttggtcagacctgcttttgacgtccggatacaaatgtttctcggtccgtatacgccgatttcatatttcggcgcagttgagaacgcctgcattttcataaaagctgacttgatttcttgaaagtaagggatgattttatctgtgacttcataatcatacgcatcgaaatcgaccgcaaagtaaatggtcgtccctgacggaaaacctaatcttcgggcggctgatgcagcgctgtacgcatctctcgttccttggtcttttacaaaataagaagattcatagccgccgtcctgataaatcggaaacacgcttaagccggcattgaaaatcgtggaaagttcttttgacgttaacgctttcgatgtcagtccgctgcttgtccgcacattcccggtcagatatcttcccacgatcttatagccattctcacgcaaagttttggccgtatctgccgtcaaaatggcagcggtgtcacaagctgaagcagcccgtgttgtgtcgcctgagcttgataataaagctttaatcgtcggcatgtccgcataaccggtctgcggcaggcacataaacttttggaaagctttcactgccgatacaactccgacgccgtattttccgtcgaattcaccgggatcaaacgcttccccattacagtaaagcgcgtattgaacaatcaaaacaaagcctgtccgtgaatcgccgggagtcaaggtagggcataagctggtcgtcccgtttccgaaaaatccattggcgacgcttgtgctcatgccttcttctttttgcagagcataaatgagagccttgtttgtatcgcgggcgtataagccgtcacaaggcatcaagccgatgtagtcattgtaatcccggttcaggttctgctggatttggcggattcttttgtcgcctcccgctactaaccgaaaagcgctcatatccagcaaggccttcataatgagtgccgtgacgatgccgtcttgcttagtgagcccggccgctttttgaaactcttttacagcgctttcggtattttcatagaaaacgcctgaaaatccgccggggttaaaacctttacaccacagcgccccctgcagaatgtaattcatgtttgtcggcttagaatcgggagcctgctttttcaacggcttaaacaatctttgtgtcgtcggtccgaagttatcggcaggttctgaaataccaagctcaatttgaagcgcccgtgtcagaccgtaaatggtatcccagcccgtttttccgttttccggcactttgttgtacccgtgtctgcctttgtacgtctcattcagccattgttgtgtttccaggaccatttcgtccattgcaatccctccattatgtgtattgtgcgttcattcataggtggcaaacgtatgacagtttgtcatgggtgcaggagtttatccaaggagagccccatcatacagccgcagaacaaacgccgaaagagaggcattgataggaaaagacctcgctatgacaattgatataaaaacaacaaaatgaatagcggtttaaagtaactttatcacttaatcaaaaataacaagaatcataagtagtagtcatatagtcattttaagggctgttcacatctcttcctgcggtcaaaatggttagttggacggatttatgattggctatattgtcattaacataaatagggtaaatagttacaggaaggaaggattttctcgatgaaaagcaaaaagatttttaagtcgctcatcatcattttcactcttttaatcagcggaattggttttatgggtttttcttctccgcaaaaagcagaggctaaagactggcttcatacttataaaagcgggtatttcactaactatgtgatcaatacatatcaccctaaattcactaaaacgacaaaaaagtacaccttgagagccgtgacttttaaatccaacagtaaagggaagggcacgtataaaatatacgtccaaaagcaagtcaacggcaaaggtgcctggaaaacaatcaaaaccgccaatgcaaagaaaaatggaacgacttattttgaaacaccttcgttaaaaaaaggagattcatacagatttaaaatggtcaatcagggttcgaaaaaacgtgtcaattatagtgcaagatggattgtgttcgcttcataatgctgattttccgatctataaagttttagctgctgcaactgcggcagctttttattttgtccggagctcaaccgccagggagcccgcacctgtctcttcgggcgtacgtttgtatttcaccgcatcattctggattatgcggaaaggtacatcgcttcaatgataagccaatcccgggttcttttgcttcgtttgaaaatgttctgatataaaaaaggcgtgccgcggtgtaaaatggctatattgataaatatggaggttgagatggatcaagattatatgactgagcttgtctcagtccagctgaagaaaatccggtcggagagaggctacacacaggagaaaatggcggatgtgatcggcctttctaaaaagtcgctggtgcagattgagaaagggcgggcgcttgcggaatggccgcatgttgtggcggtttgcgcgcttttcagatcaagtgaaacactgcaatccgtattaggagatgatccgctggaggtcattgaaacggttgctcaccgcacaattgacaggccgaaggggaagacgatgggcggcaaggtgtggtggaaagccatcgagaaaaaaggcgagttccgcttgcagcagcatttgatttcccaccattaccgcatccttgattcttatgatgatctgtggttcagcagttttgaaaaggcagaggctttggagcggcttgatgagctgtttttggaggcggaagaagcgaagcgctaagcacctccggttgatgtattttctgacaagtgggaaaatatatataaattccagccaaaggagagattcgaatgaagcctgaagatatcgtccgaagcggcccgaatcagtacatatgcaaggaaggaatcgcaaaagaacttccggggctgctggagacattcagaaaacccgttattgtgaccggaatcaaatcctatcaggcgttctccgattacggcggcggttcttcctgggatgtgattcagcataaaggatactgttcacctgaggcggtgcgtaaggtctgtgagcaggcggaagacgcggatgtgatcatcggtatcggaggcggcacgattttggatttggcaaaagcggcggcagaccggcttgatatagaagctgtgatggttccttccattgcggggacgtgtgcggcaagtacgccgttgagtgtcatatatgatgagagcggcaattttatcagagttgattatcataagcgttcaagctatttgacgcttgttgatccgctgtttttgctttcctctcccattgaatatatgaaaagcgggatcggtgatacgctggcgaaatggtatgaggctgaggcggtcatcagaaatacggaggaggcggcgccgctgatggcgcaggcggggctgagacaggcggaatatatccgtaatctgttattgcgttacagtgaagcggccgtcggaagcatggagaaaggcgagctgtccgtgccgttcatccatacggcggaaacgatcattatgcttgcgggaacggtcggcgggtatggcggccgtttgtgcaggatggcaggggcgcatgcggtccacaacggactcagttttcttcaggagacacatcaggtgctgcatggccagaaggttgcttacggcatattggtgcagctcgcgcttgagaatcggagacctgagattgaagagctgcttccgttttaccgccggctcggtttccccgtcagcctctgtgatctcggcatccttgacaaccatgaggaagccaagcgccgcattgcttctcacgcctgccgggcggaagaatcgttatgtttaatggggcaatattgcgagaaggacgtgtcagcggcgattgaatcgctcgaatcagcgcaaaagacaggatagagcttgtcatctatcttgtctttattttttgaatatttccgttataatgagtggggtatagaaagggaggggccaaaggacatgtatcaggcgaagaagatgttgttattaggatcaggcgagctggggaaagaagtcgtcattgaagcgcagcggctcggggttgtcactgtagccgttgacagctatgagcatgctcccgccatgcaggccgcgcacaaaagctatgtgattgatatgcttgataaagcgcaggtcagagaagtcattgagaaagaaaaaccggacttgatcgtgccggaagtggaagccattgcgacggatgagctgctgaagcttgaggaagaaggttttcacgtcattccgaatgcgcgtgcggcaaagctgacgatggaccgtgaaggcatcagacggcttgcggcagagacgcttcatcttccgactgccggctatgaattcgcgaatacatatgaagaatttaaagaagcggcggaaacaatcggctttccgtgcgtggtaaaaccgctgatgagctcttccggaaaagggcaaagcgtgtgccgctcggcttccgggctgaaaagctgctgggacatggcgatggaaggcggccgggtgaaaaacggccgggtcatcgttgaggaattcattccgtttgaatcagaaatcactcttctgacagtgcgtgcggcgaacggtacgtccttttgcgcgccgatcggacatgaacaaaaagacggtgactatattgaatcatggcagcctcatcatatgacggaacagcagatcaaagaggcgaaacacattgcgaaaagcataacggacgagctcggcggatacggtttgttcggggtggagcttttccttactgaagataaagtatatttcagcgaggtgtctccccgtccgcatgatacggggctcgttacgcttgtaacgcagaatttgtcggagtttgcgcttcatgtccgcgcggtattgggattcccgattacggaaatcactcagctgtcgccgggggcaagccgtccgctgaaggcgccaaaagagcttgctgattatgcggttgaaggtttggagaaggctttggcagtaaaaagcactcaggtccgcgtattcggtaaacccgtcacgaaagttggacgccgtatggcggttgcgctttctgcagctgagaccgttgaagaagccagagaaagagcggccgaagcactcagtcatttatcaattacataaaatgatcttaaaaggcgtttttaccgtaatggtaaggcgccttttttgtttggcagactatatactggaaaacggggttgtgagataatgtatgaggccgttttgtgccggctttttaattcatgaaactttttatgtccgcaatcgttatatgtaatgttctcatttcacggagaaggaaataacaatacatcatacggcttttcattcatcaagaacggacaatccggatcgcggcatggaatatttaagcagggtaatccggaatagaggaatccatgattgcttaccttaatatgaacggcgaaaaaacaaaaatcaccagattagattgttcaaataacaccaaatgctgtataataaaagaatttgaatgatagcattgaaagaatttcattttatgtttccgtaaaatggagcctttatgcatacgcagtccgatttgatatggttttaattgggggtttgtgtaaactgtgaattatatacctagtatgattacaattggaaattttatttgcgggctcttatcgattcattcccttttgtatcataatatacactctgcggtgatctttattttcaccgggatgtttcttgatttctttgacggtttggccgcccgtaagctgaacgcggtatcggagatgggaagggagcttgactcttttgctgatctcgtgacgttcggcgtagcgccgtccatgctcgcttacagtgtttcactatatacgcttccgttcatcggaattttaatcgcgctttcctacagcatctgcgggatgatccgtctttccagatttaatattgaacaaagcaagctgccgacgtttatcgggatgccgattccgtttgcgggtatgtgtcttgtcattttgagctttatcaataacgcttttcttctgggggcaggaacgatcgcgctcggttatttaatggtcagcaacattaaatttccgcactttaaaaaacaggcacctgaaaacctggagagcagaagatggaattagttcagcaattaatatccgattacggatatatcgcgatttttcttatgctgacactcggtattatcggattgcctattccggatgaagtcatgatgacgcttgtgggctacttcgctcatttaaacgtgctgaattacgggctctccattctgatcagctttatcggagcgctcctggggatgattatcagctacttcatcggcagaaaagccggccggccgtttattaataagttcgggaaatgggtcggcctgaaggaaaagaggatggagaaagtagacaggtggatgaagaagtacgggccgtacaccattattttaggttatttcatccccggcatcagacacgtgacctgctacttttccggaatcggcagaatggaattcaaaacctacttatgcttcgccgccatcggagcgtttttatggtgttttatttttattactataggaaaattcataggagtaatcaatgtttaatactgccgctaaagttctttaccgttcattgattgaactgactaataatcgattgacgtcttatctcattaaaaacttctgtgaatcgaaactgagcaagccgatgattccgctgttttccaaacactatcgcatcaactggaatgaaacggaacgcacggcttctgactttgattcattggcgtcatttttcattcgtgatattaatttgaatctccgccccgtggcaaaagagaagaacgccatcgtcagcccggtggacggtgtcgttcagacggttggcatgattaaacccaatcaaactttcatggtaaaagggaaggattattcgttcgccgaactgacggggtttaaaagcgccgatcacaagtataacggcgggtgttttgccgtgctttatctgagcccgagacattaccaccgcttccattctcccgtcagctgcacgtatcagaagctggccgagttggggaaacgctcctatcccgttaatacgatggggttaaagtacgggaaagatgtgctctcaaaaaattaccgttatgtgtacgagctgacccgtgctgatcagcagatgctcatgattccggtaggtgcgatgaatattaactcgatcgttcagacaaacaccggaaacaggcttgagacgggggaagagctgggctatttttcatttggatcgaccgttattttagtattcgagaaagatatgtttaccccttcggataacctgactgaaggccgtgaattacaggtcggccagatcatcggttatgcggagtcacaggaggaggcgtccgctttataaaagctgctcctcttttttatatggtgtaaggaagtgaacattatggaagaaaaggacttggcaaagctgatagagcagtaccagcatacaggggatcagcaaattcttgaagccgtgcgggacgcatgccggcctgtcgttgaggcgctcatctcagaactggctgaagacagcgccgatcttctgcgggcaaaaggccgtgaccgttttccgtttattatcggcaagtatcagaccgcagccggcctttcgcttgagacctttttgcgcaacacgtatcggttttattttcagcaggttttaaaaggcgaagcgtgactggaagaaagagtgcggacggaaatgttcatctttcgcccgttttcctgtatgatatagtagagtgtgcgatcattaatataattgaacagggtgtataaatcatggaaaaacaatatagagttttactttattataaatatgtaaagattgatgagcctgaggagttcacggctcagcatttgaagttttgtaaggagctcggtctgttaggccgtattttgatttctgaggaaggcattaacggtacggtgtccggaacggttgaacagacggaacaatacatgaatgcgctgaaagctgatccgcgctttgccgacatgccgatcaaaattgacgaggctgacggacatgcattccgcaaaatgtttgtgcgccataaaaaagaattggtgacgcttcgtctcgaagatgatgttgatccgaatgtcacgacgggcaagcatttgaaaccgaaagacttttatgagcaaatgcaggatcctgacacgatcgtgatcgacgccagaaacgactatgagtatgacctcggtcatttccgcggagcggtcagacctgatattgaggcgttccgtgagctgccggactggattgaagagcacaaagacatgcttgaaggcaaaaaaatcctcacgtactgcacaggcggcgtacgctgtgaaaaattttccggctggctgctgaagaagggctttgaagacgtgtcccagcttgacggcggtatcgtcacttacggtaaagatcctgaagtgaaagggcaactgtgggacggacagtgctacgtgtttgacgaaagaatcagcgtaccggtcaaccgcgtagagcacgttatcatcggaaaagactatttcacgggcgagccgtgcgagcgttatgtgaactgcgcaaatccggcatgtaataaaaaaatgatctgcacacctgagaatgaatacaaatacatgcgcagctgcagtcacgaatgccgtacgaacgaacgcaacatgtatgtgaaagagcacgaaatgactcaggaagaaatcaatgaacgccttgctttgattgagaaagaggatcatgcggcgattgattaatagaaaagaccaccaataaggtggtcttttttgtgtttacatactttctgtccgggcggtctggtctgccgtgacgggtcctttatatttgaatgctttttcccacttggacacgacgatgcaggcgaccgcatggccgggcacgttgacgccggttctcgccatgtccatgacgcggtcgacaccggcaatgatggcgacgccttccgcggggagaccgacggcattcgctgtcgccagaagcacgacgagtgagcctgacgggacggcggcaatacctttgcttgtcatgacgaggacaagcatcatcagaagctgctgagaaagcggcatctccacatgaaacgcctgcgccagaaaaatacaggacaccgataaatagaggcttgagccgtcacagttcagcgataaacctgacggaaccacaaaggagacgacccgcttcggacagccgtatttctccatccgatccatcagctgaggcagaatggtttctgtgcttgtcgtggagaaagcgatcaaaaacagatcccaaatcattttcagcacttcaaagtacttgattttaaagataagccccacgatcggaaacagaacgaagagtatcaggaacagcccgaggaacacagtgccgatcagcttcagcatcggaagcaaaagcgcgattccgaattgcccgacagaggcggccatcagggcgagaacgccgatcggagcggtgaccattaccatttgcgtcagcttgaacataatatttgccgtggattcgaagaaactcatgacaggtgcggaggctttgccgatgccggctgcggcaacaccgaataaaatcgcgaaaaaaatgacggcgagaagatcgtttttcgccatgacgtcaatgatgttaacggggataatatcaagaagcatttgtttcaggtcgactactttttccgtatagccggaaagctcgtgaatatcttttttagcaagatgagagaggttaaggccgactcccggcttcagcacgttcgccaacaacagaccgagcgccagaacaagcgtcgtaatcacttcaaaccaaataatcgttttgatgccgagactgcccatctttttcatactgccgctgccggcggctccgataacaatggtcgaaaacacgatcggcacgacaatcattttaatcaggcggataaatccgtctccgacgggccgcagcgccatcccgaaatccgggaagaaatggccgatcaatgctccgatggctaaagcgatcaaaatctggaatgcgataaattttttcaagcgaatcccccttttacttgcgcatttcatacgtaattcgtgaagcaggcggcaaccaccttcctatccgccataaatttgtcacattattgactgtgcgaaagaaaggattgctttacattatgtaagcgcaatcatttaatatgacagaaagtcctcattgaaaaaaatcaagcagaataaaataaagttagattttcgcttgaaaatatcaaaaattttgataattatcctcttataagtggtatatttgatatgatacggtcaactgcatcctcatatatctgtgcatacacgattcaggcagagaaaacaggcagcttataaaagactgaaaattttaacaattacaagaaaggtgtgcttttgttgaatcaactgattgaaagacgtaaggtcacagcaagaaaagaaaaaccggactccgcttcattggggtttggcaagtacttcacagattacatgtttgtcatggattacgaagaggagagagggtggcatgatccgagaatcaccccttatgaaccggtccatctggatccttccgcatcggttttccattacgggcaggccgtatttgaagggctgaaggcttacaggtcagaagacggccgggtattgatgttccgtcctgaccaaaatataaaacggctgaataaatcgttacggcggatgagcatgccgcctcttgacgagaagctggcgctggaggcattgatacaattggtggagctggaacaggaatggataccgatagaaaaaggaacctctttatatatccgtccgtttgtaattgcgactgagccttctttaggcgtccggccgtcaaagcgttacaagttcatggttgttctgacgcctgtcggttcgtattacggcgatcagctgaaaccgatccgaatttatgtggaggatgagtatgtgcgtgccgtcaccggcggagtgggcgacgtcaaaacgtccggaaattatgcggccagcttacaggctcagcggaaagccgaagaactggggtatgatcaggtgctttggctcgacggggtggaaaagaaatatgccgaagaggtagggagtatgaatatctttttcatcataaacggagaggccgtaacgccggcgttaaacggaagcattctcgggggcatcacacgcgcatctgtgatagagctgttaaaaagctggggcatccgcgtcagggaagaacaggtcgccattgaagacatctatgaggctgcgatgagaggcgaggtgtcagaggtattcggtacgggaaccgcggccgtcatctcgccggtcggcgcgctgcacattcacggagcaacgattgaactgaataacggtttgatcggtgaagtgtcagaaaggctctatgaaacgattgccggcatccaagtcgggaaggtgcgggattcgttcaggtgggtggttgaagtataaatgaaaaaagaacccttgcgctgcagggttctttttttggttattgggattttacggcttgcacgcgggctctgcttttccggtttttcaagtaataagcggtgtagcaaacggccataaatgcaattccgcaataaagggcgatggcctggttcggatcaaaagcgatgccgatacaggaggcgaggcacaggagaaaggccgctatcggtacggccggatatcccggcgtcctgtatttcaagtctgaaagctggtgcccttctgtaagaaaccgtcttcggaacaaaaattgcgatgcggcgatgctcatccacacagccactaccgcaaatcctgagacggagacgagaacaagatagactgtatccgctgcaaatacgcttgacaacaacgacagaatgccgccgatcatactgaagatcagagcgttaaaaggaatgcctttagaggtcagcctggcaaaggcgggatgaagctccccttctttagacagggaccacagcatgcgtgatgacgcgtacagccctgaattggccgcagacagtagcgccgttaaaatgacgaaattcatcagatcggccgcataaggcacgccgactctgtcaaataccgtgacgaatgggctttcaatcacaccggcttccttgatggagatcatccctgacagcacaaaaatcgttccgataaagaaaagcgccagccgccagactgtggtcttaatggcgcgcggaacggttttttccggatcggcgctttcccctgcggcgattccgatcaactccgtccctgaaaaagcaaagtttactgaaagcatcgtcatcagtatcgggaaaaagccatttggaaaaaggctgccgccatccgtaaagttcgacagcataggtgcggcctcaccgcttttcatcgggacgatgccgaacatcgctgctccgcccaataaaataaacagtaagatggctaagactttaatgcttgagaaccaaaactccgattcagcaaaaaatttcacggagaaggcgtttaataaaaagatgaaaagagcgaataccgcactccacatccaaaccgaagtatgcgggaaccaacgctgcatgaaaagcccggccgccgtgaattcagagcccagcgccaccgcccacgtcagccagtacagccatgcgaccgtaaagcccgtcgccggcccgatataggtcttcgcataggtgtggaatgcgcccgtcaccggcatggccactgacagttcaccaaggcaaagcatgacaagatagacgatgcccgcgcccaaaaggtaagcgaaaatggtgcccgccggacccgcctgatgaatggtatacccagagcttaaaaacagccccgttccgatcacacctccgagtgatagcataaagaggtgtctgcttttcatacttctctgaaaattcgtctcgtacttgttgttcattgttttccaactttctgcgagggccgttctaataaaaaatctcatgccgacgaacggcacgagattccggcgaaccggctttttgaatagaatatacaaactattccgattagtcaagttgtttttaaggtcttggcccaatcggcaatggcctgaatgtccgcaggtttcgtccggcagcagcctccgatcatgctcacgccgttttcgtaccagccttgcgcgctttttccgaaatggttttcgcacgctgcgcctttccaggtttttgtcactgggtcatattgttcgccggagttcggataggcgataatcggtttggatgctgaccgtttgatttcttctatcaacggcggaatatgttcaatcggtgtgcagttgatgccgatcgctgcgatttgactgcaggagtcaagcagggccgcgcatttggaaattggcgtgccttcgctgatatgccgtccgtctttggcgctgaagctgatccatgcataagtgccggggaattcctccagcagccttgtgatcgcttttgcttctgacaggcacggaatggtctcacaggccaaaagatcggcgccggattctatgagggctttcatccgggtgcggtgaaagctgatcagctcatcctccgtcagtccgtaatgcccgcgatattctgagccgtcagcgaggctcgcgccgtaaggcccgatagaagcggcgaccaaaggtttgggccggtgtaaacggttttcttcatgcgcccaaaattcatcgcgtgcttgtgcggcaagttcaacagatgtctgaatgagacgtatcgcatcggtttccgggatgccgcgcgctgcaaatccttcgattgtcgattgataactggcggtgatcgcgcaatcagcgccggcggcaaaatattctgcatgcacctgtttgatcagttctggtctctccaaaagaattttggccgaccacagatcatcatgtaaatcacagcccatacgctcaagctcggttgccatcgcgccgtctatgatcataaccgggtattcatttaatatttgtgtaatgggattcataggccttcctttctgactttactgaaaatatataaaaagggtaatggacgctattctctttgtcaatgaaccggcagaaaaaaggtgttcaggacgctgcccgaacaccttttgtttaggaaatgtgtttgcctttcgcacttttcgcgatgtctgaatactcccagcagtcgatcccgtcatcatcagggagtacatctctgtaaaagacggggtcctttccggctttcttttgccgggcataatcgctcaaagcggcaaacgcttttttcgacagaaggaaaatcgcgattaagttcacgaccaccattaagcccatgaataagtcagccatatcccacacaagctggactttggaaatacagccgaacagtaccattccgagcacgcagatgcggtaaatgaacagccattttttgttctggcttaaaaatccgatattggtttctccgtaataatagttgcccatcagagcgctgaagccgaacaaaagcattaagacggcaaggaaacctgacgcccacgcgccgacatggtcgctcaaggcggcctgagaaagcgcgatgccgctcagtcccggctggtgataagcgtctgaaaataaaatgataagcgccgtgcttgtacaaatgacgagcgtatccgtcaggacgccgaatgcctgaatgagcccctgtttcaccgggtggctcgtcgtagctgtcgccgccgcgttcggagcgcttcccatacccgcttcatttgagaaaatcccgcgcctaacaccttgcatcaaggccgcacctaaagcgccgcccgctgcctgatcaatgccgaacgcattttttacgattagcgacagaacgccgggcaattgggtgatgttcgtcagaatgacaaagaaagcgacaccgatatataaaacggccaagacgactacgatgtattccgccattttcgcaattcgtttgacgccgccgaagattacgccgccgaaaaccacgattaaaataatgcccaatgtaagccggctggtgccgaatgcgttttgaaaggcgacgctgatcgtattggattgaacggaattaaaaactaccccgaatgacagtgtgattaatacggcgaacagcgcgcccatccagcgtttcttcaggcccttttccatgtaataggccgggcctccgcgaaatccgttttgatcttttactttatagatttgggccagcgtgctttcaacaaagcttgaagccgaaccgatgactgcgataatccacatccagaaaatagcgcccggaccgccgagtgcgatcgcaatggcgattccggtaatattcccggttccgacacgcgccgccatactgatgcaaaatgcctgaaacggggaaatggtgttttttgtccgggcggccgcgccttccttcaaaacccggatcatttccttcagcatgcggacttgcagaccctttgatctgaacgtaaaaaacagtcccagagaaagaagcagtacgattaacagttttgaccataaaaaatcatttgccgagccgattacattttcaaggaattcctgcatccaatcacctcttggttcgtttgattaaaaaatactgagctcccactcctgtgcgatatgtttcagcagcatgccgccggtcaggctgttgccgtattcatcaatggccggaccgtaaatgccgatgccgcagccgttatgaaaaggctgttctcttctggcgcttgggggaaccaatgccataatgccgccggataccccgcttttggccgggacgccgacgaaagccgcatatttgcctgacgcattgtacattccgcacgtcagcatcagggctttggcgagtttcgcgacatctttcggaatgacctgttcccgtcggatcggatggtagccgtcatgcgcaagtatcaatccgattaaagcgatgtcctcggttgtaccctccatggcgcactgctttaaatacacttcaagcgtttcttccacatccgcctctagaaagttcgtttcttttaaatagtaggcgagcgctctgttccgatgcgcggtctgccattcagaacggaagacctcctcgtgaatgtgaggccgttttcctattaatttttcaaaaacggaaaagagatattctaatttatcatgcgccgtttcacccggaagcagcgaggcgacggtaatggcgccggcattgatcatcgggttgaagggcttcccgggtttatggatttcaagccggatgatagaattaaacgcatcacccgtcggttccacgtccacacgatccagcacgtaagaaatgcctctgttcatgcaggcggcaataaagctgatgacttttgagatgctctgcaatgtgaacgggacattccattcaccggcatgaatcattgagccatccggctctaatatgcaaatgcccagctgagagtcgttgatttctccgagggcgggtatataatttgcgctttttccattgacggaaaacggtcggtaatgctcgacccaatcttgtaaaagtgaagccagttcctctttttcaaggcgctctctgaccatatctttcataacattcctcctctattgcaagcctgtccgaagcggaaaccggtcttggaaaacgttttcaaaaatagcgtgttccatgttaatgtataatgacatctacagaatcatacaaaatacgacaaaatcattcttaaaataagccgatagatttataaatcagccggagcgtcccgccattcgggtctaaagaaatttgcggactgtatcggtcttgttcaaaatagacagaagaaggaagtgattatgatcaggctcgactatttactgaaaaaagacggctatcttttcgcccttatgctgatcaccgtgccgctggcgggggaactgaaattttaccccctgaatgaggtatatcggatcagcttcggcgccccggcttttttcttttttctgctgctgcttcggcatgtgccggcagtattgtcagggctgttgacaggtgcagccgttgtggcattccggatcggcctggcgtgctggggaggagagcatgccggctttacggaggtttttttcagccaatatcccagtttctttttttactttacatatgcctgcttgttttatgtgctgaaggtcaggcttttttgggatcggccgcttatgatcggttttctcggttttctcattgaaattgcgtccgatgccgttgaaatgacggttcagttttccggcggccggcagattatgatgccggacaagctggcggatattgcggttatcgctgtttctcacacatttattgtgctgagttttttcaacgtgatgaagctgcacgaatctcaggtcagggaaaaacaaacgagaaagcagcatgagcacatgctgatgattgtgtccaacttatatgaagaaacgattcatttgaaaaaaacgctgaaaacgacggagcatgtgacgaaagaatcctatcagctatatcgggaaatgagcgggaacgaccgggagctcgggagccgaatgctgcgccttgcgggagagattcatgaagtgaaaaaagacaatcagcgaatattcgccggcctgtcgaagctgatttccaatgagagattccgggattacatgaatgccgccgctctggtcggcatcgtcatccgaatcaatgaaaaatacgccgaatctttaggcaaggacattcaattccggagcgtgattgaaggagagcatcccgattatcacgtctttaccgtcctgtcgatcttaaataacctgaccgccaatgccgtcgaagccatgggagacaggggtgagatccgcctcgcgctgcgcaggacggaaggagaaaaggctgaatttcaggcggaagatgacggtcccggcattccggaaaaaatcggagaggtcgtttatgatcccgggtttacgtccaaatacgatgaattcggcacaccttcaacgggcatcgggcttacttacgtgaaggaaatcgtaactgaacttgacggagacatttcctttcataacaagccaaaaggcgtcatatttacgattaaactgccggtgaagcatttgattgcagaaaggatgaactcataatatgcgtttttttatagctgatgatgaccgggcgatccgttccattttaaaacagatgatcgaggacgaggatttaggcgaagtcgtcggtgaggcagaggacggaagccagattgaagggcattatctccattttaaacaagtcgatattttattaattgatctgctgatgccgggtcgggacgggattgagacgatccggcatcttcaggggtcgtacaacggaaaagcggtgatgatatcgcaggtggaggcaaaggaaatggtgggagaagcttattctctcggcatcgaatactttatccacaaaccgatcaacaaaatcgagatcgtcaccgttttgcgaaaagtaaaagagcggattgaactggaaacctcgatcggcgacatccaacactcgttaagccgtcttattcagcggaatgagccgaaaaaaagcgggccgggggggatgcacgagaaatcaatcaaagaaacaggaaaatttcttttatcggaattaggcatcgtgggagaaagcggggcgcatgacctcatggccgtccttcactatttatttgaggatgaacaggcggaaagaaacatcccgtctttaaagcagatgtttacaaacgtcgccatccggaagctggggcctgcggcggcacaagccgaggttaacagggaaatcaaagcctcggaacagcggatcagaagggccgtcattcattcgttaaaccatttcgcttcattgggcacaactgatttttcaaaccccaaatttgaatattacgcctcgaaattctttgatttccccgctgtcagcaagagaatgaaagaaatgcaggctaaggaaaccgtgccgctttctccggttaaagtgaatatgaaaaaattcattcacgtcttctttttggaggcgaaagatttacgcgaaggatcaaaatttgtcagcggaggcagccggtaagctggctttggaaaagatggcaaacgtggataaatgacagctcgtactggcctgatttttccgtgctgatccatggcgacttgcatcctccgcatatttttgtaaacgaaaatcagcatgtgacagaatggcaggccgcttaccctgtggaaacggcgaagttcgcgcttcagacggggcaagaggagcatatgcaaatggcgcgggacatgctcggcctgaccgatccgaaaggttattgacttccgccggatgacagcgtatgatacattttaaaataaaagaacggatgaacaatgctgaggaagagtaagtacgcatcagcgcgcggggttcagagagtcggtggccgctgtgaaccgatccccgtccggtgccgaatgggcttctgaattgctgcgctgaaatgacagtaggcggtgccgggattcttccccgttatcaagaaaggagtattgaaaccgtgtgtttctgtactttttgagagaatggcttatcagccgttaataaaggtggcaccgcgaaaacctcgtcctttgatggacggggtttttttgtattgttaaggaggtgatggccatggaaagtgactggagacggacagacaatcaaaaaaggagggatattcatggtgatcgcaaccgacgatcttgagctcacgtgtccgcattgtgaaggaaccggcgaggagaaggaagggacgccctgtccgaagtgcggcgcgaagggcgtcatattgaccgctcaaggaaacacgctgctgcattttatcagaaagcatattgatcagtgaaatcaaacgaaaaaggccgttatccggccttcaggctgtcgagaaaacctcgacagcctttatgtttcccttgtcataaaataaaagaaagactgaaaaaaacggtttctttctcatgttccacacaagaaatttttctcgaaacacagccgaattcgttctgtttaaccaactcgtcgaagaggatcaccttcttcgaaaaattgataaatacatagacttctctttcattgttgaaaaggtcaaaccttactgcagcgaacacttgatccgctgatcttattcaaaatgatgttgaagattgccacatacccagccaagcaaagctaggcatgtgggagtgctttttctgcacctgaaatcaaatgaatatgtaaagaaacagcacaaaacaaaaaagcttgtagaaaaacatcattttctctacaagctgctttttcattcttcaaaataaggattcacatggatgagcacttcttcaacatctgaaaagtgtctttggatttcatttcggatttcgcgggcaatatcgtgtccctgcttaatcgtcaaatcatgatccaaagataaccggacatcaagcaatttatagtggccgtgttctcttgctcggattttatcgagccgtttgacttgagggcagtgcaaaataacggctttatattcctctatcagttcgggatcaacacttttttccatgagaacgtcaacagacggcctgattaattccattgaaatcttaaaaataaggtacgccacgatgacactggcaattgcatcggcgtacaacagataggaccatccgcgtgtgttcccgataatcgccaataggacgccgataaaagcggcaagagaggcaacgatatcgcctttatgatcgtatgcaatcgctataatcgctttactgttccatttttccccttgtttgatcgaataacgatataagatctgcttagccgcgtaggatatcagagccgcaaacaatgcgctgtattgcgggatgcttggaccttcaacaaaggacgaaatcgcttctatcagaatatacacggaaacgagcactaatatgattcctacaatcgcttcgctgatgacctcagctttgccatgcccgaaaggatggtcttgatcgggcggcttattagaaatgccgatgacggccaggacagcaattgaagccgcgacatccgctgcagaatgtataccgtcggcaaaaactgcttcactatcgcctatcagtccaaaaaagatctttcctgccattaagatcagattggctatcaatgcaatcaaagcaacttttttgcttatttgttctctttcacttgtcattttttcctcctataaaactgcacaaaaaaatagaggcgcttttgattcgctctccgtatcctttcttgtgtaatcactttgcttatcgtaccaattcagtttcgagtgggtctatagcaaggttgtttcctgtttcctaataaataaggtgacagaaaaaaagttggagcagggctaaacagtacacagacaaaatggcgctgaattaaaaaaagaactgttgacatttgagtgtttatcttttattattatctcgaattcaagattttttaattcaagataatttaattagagtgcagtataagaacctgccgatcgtttgaatcacgaaaagatcagtgaagagaacgtttcgttttttaatcatacgttatttgattttttatactataatatctcgaattcgagataaaaggggtgcgagggaaatggctgaatttgtacagctagtgaatgaaagaagatctgcaagcaactttcttccagaacatccaatcacaagagatgagctcaatgaaatgtttgaattggttgcgttggctccatcagcttttaatttgcagcacacaaaatatgtgacggttcttgacccggatgtaaaagaaaagctgaaacaggccgcaaacggacaatataaagtgtttagctcatcagctgttcttttggttttaggggataagcaggcatatcagcaagcggctgacatctatgaaggattgaagatgctgggggtattaaataaacaagagtatgatcacatggttcaagacaccgtttcgttttatgaaaacaggggagaaccatttaagagagatgaggcgataagaaatgcttcactttctgcgatgatgtttatgctgagtgctaaggaaaaaggctgggacacctgtccgatgatagggtttgatgctgaagccgtgaaacagattttgaagatagatgatcaatttgaggtcgtcatgatgattacaatcgggaaagaaaaaatagaaagcagaaggccgcgcggctaccgaaagcctgtgaatgagtttgtggagtatatttaactatttgtaaaggagcaaataaaaatggcgaaaaaaacgatgggcatccatcatattacggcaattgtcggtcaccctcaagagaatgctgatttctacgctggagtgctggggctgcgattggttaagcaaacggtcaattttgatgatccgggtacgtatcacctttattttggggatgaaggcgggaagccgggaacaatcatcacattctttccgtgggcgggcgcccgccaaggcatcattggagacggacaggttggcgtgacatcttacgccgtgccgaagggtgccatggcgttttgggaaaagagacttgaaaagttcaacattccatacacaaaaatcgagcgttttggagaacaatatatagaatttgatgacccgcatggcctgcatttagaaatcgtggaaagagaagcagtggaggccaatacgtggactttcggagatgtaaccccggatgttgccattaaaggctttggcggtgcaaccctgttatcagcacagcctgaaaaaacaggtgaattgctggaaaatatcatggggcttgagcgagtcggtaaagaaggagacttcgttcgttatcgttctgccggtgatatcggaaatgtgattgaccttaagttaacgcctatcggccgcgggcaaatgggtatcggcacggtccatcacatcgcttggcgggctcaggatgacgaagatcaattagattggcaaaggttcattgctgcgcacggatatggtgtgactcctgttcaggatagaaactattttaatgcggtttacttcagagaacatggggaaatcttatttgagattgcaactgatccgccgggctttgcccatgatgagtcacaagaaaaaatgggcggaaaactgatgctccctgagcagtatgaaccgcaccgggcacaaattgaacaagggctgctgccgtttgaagtgagagaattagattgattgatagatgaacgtgaagcatgaagaaaaataacaagacatacatttaacagatgtttgctggaagcgactgttggtaaacagctgccttgcagacatcatataatatgaaaaataaggagagataaaaatggaagatgcaggactattacttattcgaatcatgattggtgtggtgtttctgttttatggatcacaaaaattattcggctggtttggcggatacggaattaaaggaaccggacaatggttcgagtcaattggagttaaaccaggtaatgccgcggccgctttatcaggtctcggggaactcgcaagcggaattctatttattttaggtgttttcctcccgctcggagctgctattataacgattattatgttaggtgccatcgtaaaagtccatggagcgaaaggatttgccaacggtgccggcggttttgaatataacttggtgctgattgcagtctccatcggagttgcactcatcggttcaggggcgtacgctttgcatttttaatataagtatctaagaacagttactgaaaagcggtaactgttcttttattttcaagcacaacgttcaggtgctctgaatagcaaaaaagcggatatgttcaatataaatgtgtatagtgaatgtacgcgtattgatgagcttggtcatgaaagacgagccgattggaggagggttttgttgaaagagatggcagaattacattcattagattctatcgagaattttattaaacagcatcaattcagttttatctacatttcaagacccgcctgtacagtatgtcacgctgttctgccgcagctcagaaaagtattggatcagtttccgaatatcaaattggggcatatcaatgctgacgaggtagaagaggtggccggcagattttcagtcttcactgttcccgtgcttcttttgttcattgatgggactgagtttctgagagaagcccgctttgttcattttgaacagctcgaagaaaggctgaaaagggtttatcagttatatcaagatgtataaagcgtttatactttacaaataaaaagccccctttaaaggggcttttatccggccttttttacgttattcggaccggggttctaaaaaacgggacccgcccaagtcttttctcatcagatagatatggaaaaaatattctccgacggcgatgatgacggcggaaataagagcggcaaacgccagtcttcctccggaaatgcccatggacagcggcattcccatcagccagacaacaagaaacgcgattccgaaatcagcggacgccgccgtgatgttattccatctcggcagcacgtacaggtcgcccgtaaagtaagaaacggctcccagcacaatggtcatcagcagcacgtcgccgaatgtaaagcgaaaacctaagccgagtatcagatacagaataatgatggtcataatgcctttgatggcaagcgctttaatgtgttccatgcgaattcctccttatggaaatcatgttagtatgtttcctcataacgtgaaatataaacccttttttcgtgaacatttgttttctggcttttgtctgtcatcactgggccgcggctgaatatgatgaagggagaaaatacgggaggtgtcatgatggcagtcgtaaaagcgtcgagcgccgatctggatctaatggcaaggctgctcagggcggaagcggaaggcgaagggaagcagggaatgcttttggtcggcaatgtgggaatcaatcgggtgcgggcgaattgttctgattttaaaggcctgcgcaccatcaggcagatggtgtttcagccgcacgcgtttgaagcggtgactcacggatacttttaccagagaccgcgtgaatccgagcggaggcttgcccgccggacgattaacggagaacggttttggccggctaagttcagtctgtggtattttaagccgccgggaaactgcccgccgacttggtatgatcagccgtttgtcgcgagattcaaatcccactgcttctatcagccgacaggtgaaacgtgcgaaaacgtgtacaatacattttaatcccgggcgcaccgttctgagaatgaacggtgtttttttaatttcttgtgaagaaaaacaggaaaaaagttcgcttgacggatgacaagccaaaaagaaacagagggggttttctcccggcggggcaaggtttgtcgaaacaatgtgaaaaatgtctcccgccgtccatttttcagccttacaaacccttcacacttcttcatagcggtttaacatttcttttttataataagggcgatcaatgagacgaaaggggaactgacatgacacatgacggccgtttagatgaatggatcaaggaattggagaacaaaagctttcagaacaatacgtttgaccgccgcgcatttatacagggcgccgggaaaatcgccggtctttccctcgggttagcgatcgcgcaatccatcggcgcgtttgaagtgaatgccgctccgaaattttcaaactatccgttcaccctcggcgtagcttccggcgacccgctgtctgacagcgtcattctctggacgcgtcttgcccctgacccgctgaatgggggcggcatgccgaagcaggccgtgccggtaaaatgggaaatcgcggctgatgaacattttcgtcacatcgtcaaacgcggaacggaaatggccaagccgaatctcggacactccgtccatgtcgaggcggacgggctcaagcccaataaagtgtactattaccggtttaaaagcgggcatgagctcagtcccgtcggccggacgaaaacgctgcccgctcccggtgctgacgtatccgccatgacgtttgcatttgcctcatgccagcagtatgaacacggctattatacggcgtataaacatatggcgaaggaaaagcttgatctcgtgttccatctcggagattacatttatgaatacggaccgaacgaatatgtgtcaaaaacgggaaatgtcaggacgcacagcagcgctgaagtgtatacactgtcagattaccgcaaccgtcatgcccaataccgctctgatgccaatctgaaagccgcccacgccgcatttccgtgggtcgtgacgtgggacgatcatgaggtggaaaacaattatgccaatattatccctgaaaaaggccaatccgttgaagcgtttgtgctcaggagggccgcagcttatcaggcttattatgaacacatgccgctcaggcgcatgtcattgccgaacggtcctgatatgcggctgtacaggcaattttcttatggcaatttagcatcgttcaatgtgcttgatacaagacagtacagagatgatcaggccaacggcgacgggaataagccgccttctgatgagtggagagatccgaagcgtacattgatggggacagaacaggagcaatggctcttcggaaatttagccgcctcgaaagcgaagtggaatgtgctggcgcagcaaatctttttcgcgcaatggaatttcggaacaaccgccaatccgatatacagcatggattcatgggacggctacccggctcagcgggagcgggtcatcaattttataaaaagcaaaaacctgaacaatgtcatcgtgctgacgggtgatgttcacgcaagctgggcgtcaaacctgcataccgattttaatcaaacgaattcaaagattttcggagccgaattcgtcggaacttccattacatctggaggaaacggagcggataaacgggccgatacggatcagatcttaaaacaaaacccgcatattaagtttttcaacgattaccgcggctatgtccgctgtacggtgacccctgcccaatggagagcggattacagagtggtgccgtacgtgacggagccgggggctgaggtatccacgcgggcttcattcatttatcagaaagaccagacggggattcggaaggtctctcaagctgcggttgcaggcggtgtaaagcagtcaaacgaggtggaagaggatcgtttcttcgcccataacaatgcgcatgaaaagcaaatgagaaagaaacgggccaaaatctcacaataaggaggcacactcatgttttcaaatatcggcattcccgggttgatcctgatattcgtcatcgctctcatcattttcgggccttcaaagcttccggaaatcggccgtgccgccggccgcacgctgcttgaatttaaaagcgccgcaaaaacactggtctcaaatgaagagccggacaagcagacggctgagaaagacaaaacggcaggctgaatcctgacatgggggcagacgaatccgcttctgcctctttctctataaggaggatgtacgattggataaaaaagaaacccacttgatcgggcatttagaggaagtccggcagcgtctcattaaaaccgttatcgcctttctcgtgttttttatcggcgcctgctggtttgtgcaggatatttatgactggctgatcaaggatttggatggcaggctggccgttttagggccgagtgagattttatgggtgtatatgatgattgcgggaatatgtgcccttacggcaacgattccggttgcggcctttcagctctggcgttttacggcgccggctttgaccccgtttgaacgccgcgccgctttgctttacatcccggggctttcggttttgtttattatcggaatttccttcgggtattttgtgctgtttccgattgtgctcggatttttaacacaattatccgccggccattttgacatggtatttacggcggacaagtattttacctttatgctgaatcttacattaccgttcggatttttgtttgaaatgcctctggccgtcatgtttttgacacggctcggaatcgtgaatccaacccggctggcaaaggcgcggaagctttcgtattttgtgctgatcgttgtctcggtgctgattacgcctccggaatttatgtctgactttctcgtcatgattccgctgctcgtcctctatgaaatcagtgtgacgctgtcccgcatcgtttaccggaagaaatgggccgaggcgccgtctgcagcttagtgaagttcgcctccgccggtctcaatatcgtcctcatgcgccgcggcggtcaccgcggcgattttgagcgcttttgtcacgagatccaggctgaggctcggcgcagacttttgcaaggtttgccccggaatgtacgggatgtgtataaacccgccgcggatgtgcggatgatggcggctgatttcatccatcagcccgtaaaagaggtgattgcatacaaatgtccccgccgtgtaggatacagccgcgggaatgccttcctttttgatttcctcaacgatccgtttgatcggaaggccggtccaataagccgcgggaccgtcttgagaaatgttttccccgacaggctggtttccttcgttatccggtatgcgcgcctcattgagattgatcgcgacccgttccggcgtgatctgcattctgccgcctgcctgtccgacacagatgataatgtcaggctgatgctttttgattgcctcgcgcagcacggcaagagacttataaaaaacggtcggcacttgttcagatacgatagaggcggggccctcagcggcaccattcagccgtttgaccgcttcccatgaaggattgaccgtttccccgccgaaggggtcaaagcctgtcagcaatacttttttctccatataaaaccctccttttctttttaccatactctataatggacatatattcctgccgaagggggaaacatgtcttgaattcgcctctggtgcaataccgatctttatttccggcgctccgcacacatacgatgctcgccagctgctctcaaagcgctcttgccctgccggtttcaaaagcgatcaatgactatcaggaaagcctgcttcagcatggcggaaactgggaagaagccattggacgaacggagcaggcaaggtgtgaatttgcgaaattgatcggcgcccatcctgaagaaatcgccgttttaccttcagtaacggctgctgtctctgccgtcgtttctgctttgccggattgccgaaagaaacaggcggtgtatacggaattggattttccggcgatcgcccacattttgaaggcacagactgagatggagctttcagtcgtgccgtctgaagacggaatgatcccgttagaacggtatgagacgtacatatcggaacagacgcttttcacctgtgtgccccatgtgtcatatacgtccggttttgtccaggatatgaagcgcattgccgagatatccgcaaagaagggatcgcttctttttgtcgatgcttatcaatcagcggggcacatcccgattgatgtaaaagaatggggagttgatatgctggccgcgggtgcgagaaagtatatgctcggcataccgggaacggcgtttctttatgtcagaaaggaactcgccgaacggctgaagccgaaagtcaccgggtggttcgggcagcagcgggcgtcgatgctggatttaacccgtttttcttatgcggacggagccaaacgctttgagaccggaaccccggcttttatcagcatatatgcggcacaggcggctttatctctagtaaacgatgccggcacagaccgcattcaccgggaagtaaaaaaactcagcacatttgcgtatgaatacgcttttgaaaaagggttgcacctcacagggccgccgtctgccgatgacagacccggcatgatttccatacgggatgaaaaagcggcggaaacggctgcgctgttgaggcggaaaaacatcgtatgcgcacccagcggacatatcatccggctggcgcctcatttctataacacggccgatgatctgatgtatgcgattgatgaactggctgaagcgcgcggtatataaaaaaacagcagactcacggggagcctgctgttttcttatgagtgattcactttgacccgtttcataaagaaggcgctgatcaagccgataacagcgacaatcatcgcgaagataaaggcgtgctggacgcccgcaatcagcgcgtgagagtatgcggaaggatcattcgggtttttcacggtgctcatataattcttctgcccggctgccatgatgctgaccgccaccgcagtgccgattgcgccggccatctgctggagcgtattcataatggccgttccgtccggataaaattccggcggcagctggtttaagccgttcgtttgcgccggcatcatgatcatggaaatgccgatcatcaggcatgtgtggagcacgacgatgagaatggccgttgaagtgccggtaatgtttgagaaaaaccaaagtacggcggccgtgatgacaaacccgggaatgacaagccacttcggtccgtatttgtcaaacaggcgccccgtcaccggagacataaagccgtttaaaataccgcccggcagcaggatgagtccggacgtaaacgccgtcagcatcagtccgctttgtaaatacataggcaatagaagcattgttgataagataaccatcatacagataaatacaatcacgacaccgagaacaaacatcggatagcggaaagcgcgcagattcatcatcggctgcttcattgtcagctgcctgatggaaaataagatgagcgcgatcgcaccgacagtgagcgaaccgataaccgtcgggcttgaccagccgtctgatccttcgcccgcattgctgaatccgaatacgatgccgccaaacccgatcgtagacagaataatggaaagcacgtcaattttcggttttgtaatgtcagacacgttctgcatgtaggcgatgccgaataaaagagccaacacaagaaacggcagagaaatccagaaaatccaatgccagttcaaatgctctaacacaagccctgaaaatgtcggaccgatcgcaggagcgaacatgatgacaagcccgatcgtccccatcgccgctccgcgcttatgcggcggaaagatgacgaggattgtattaaacatcagcggcagcagcagcccggttcctaaagcctgcacgattctcgccgccaaaagaaacggaaagctcggcgcaagcgctgcaatcagcgtgccgataatggaaaaagcgagtgaaacgataaacagctgtctcgtcgtaaaccattgcaaaagcagacccgataccgggacaagaataccgagaacgagcagatagcccgtcgtcagccactggacggtcgcaggagtgatatgtaactccttcatcaggtcagtcagggcgatattcagcgccgtttcactgaacatgccgataaaccctgccgtcagtaaagaaatcatgatcggcatgactttatattgtttggaaggctgagcgttttccaaaatcattctcctctctttctatacgtacatgtctctcgtattttatgtcttcagcaggttcgggatttgtttagaaatatggaggatcggcattttgtcttttttggctaaggacacaatgatgccgccttctatcatggcatttaaaacagtgctgatttccgccgctttctcatcagaaaaaccggctgatctcaatttgcccgcgaacagattctcccattcctgataagcgctttgacaggcctgccggagcttttcgctctttaaagcagtctcggcagccagtaaaccgacaggaaacccttcaaagttttccggacatgtgaattggcttgataagtcctgtaaaaacgcttgaatgctttccgcaggatcaggatgggcatcaaggctttcttttattttcatacggatataatggctcatttcattgacagcctcaatggcgagctgctctttgccgtccggaaaatgatagtaaagagaacctttcggcgcaccgctttctttaataatctgattcagccccgtgccgtaatacccctgaagctgaaacagcctggttgccgcggcgaggattttttcacgagaatctccatagctcataatgttcccaccttactgatttttgacaaatttaaaatatagtgactggtctattatcttgatttcacatgacggtgtcaaggttttttaacggttattttcttcgggaggttgcctgacaagcgcgttgaccggtgagaggaaaatcttcataaataaagaaaaggagagaaaagaatgaaaaaacaatttatgcccttcattacatttatcacggctctgctcttcatcgcggccggctgctcccaatctcctcaagcgaaagaaacaccgccccggatggcagccgcagcctcagcgaaaaaagacggacttccgaatgttaaaattcttgccgccggcggcacaattgcaggcgctgctccttcaaagacgtcagctacggagtacacggcgggggcaatcggagttgacgccctgattcaggccgttccggagataaaagaggtcgcgcatgtgagcggagaacaggttgtgaatatcggcagccagaatatgaataacgagacactgctgaaacttgcaaaacgggtaaacaagctgctcaagtctgatgatacagacggcattgtcattacacatggaacagacacacttgaggaaaccgcctactttctcaatctgacggtcaaaagtgacaagcccgttgttgtcgccgggtcaatgaggccgtccacggcgatcggagcagacgggccgtccaacttatataacgctgtaaaaacagcggctgcgcctgatgcgaaaggtaaggggacgcttgtcgtattaaatgacagaatcgcttcggcgcgctatgtgacaaaaaccaatacaaccgcggcagacacattcaaatcggaagagatgggttatatcggaacaattgctgatgacatctattttaataacatcatgacccgaaagcatacgaaggatacagatttcaagatagataaacttgataaactgccgcaagtcgatattatatacggctatcaaaatgacggaagctatctctttgaagctgccgtaaaatcaggggcgcaaggcattatttttgcaggctcgggaaacggctcaatgtctgatgcggcgcaaaaaggcgccgtaaagtcggtcaaaagcgggctggcggtcgtccgctccacaaggacgggaaacggaacggtaacacctaatcgagagtatgaaaaagaccatttgacagcttcaaactctctcaaccctcaaaaagcgcggattctgctgatgctcgcgctgacaaaaacgcatgaccctaagcggattcaaacctatttcaatgagtactaggagaagagaaccgggtgttctctcctttttttgtttgccgtattaaagtataagtgtgctttcgggaaaggggcgtctttctcatttttccgcctctttttcaattgttgaaaacagtaaaaaatactctattttttccttttcttctctaataaaatgaaaattgcaaaaaattacataacaggaggaaagttcatgaaacaaatcaaaagcaaaatcctagcgatccttacagtctgcatgctctccgtcatttccgtatttgccttccagccgaccgtatcgaaagcctcctcagagcataacccggttgtcatggtccacggaatcggcggggcgtcctttaacttcgcgggaatcaaaacgtacttggcatcccaaggctggtcaagaaatgagatgtacgccattgattttctggacaaaaccggaaacaacagacacaatgcaccgagactgtccaattacgtgaaaaaagtgctcagcgaaacaggtgcgaaaaaagtcgatatcgtcgcgcacagcatgggcggcgccaacacgctctattacattaaaaatcttgacggcggagacaaaatcgcaaacgtcgtcacactgggcggagcgaacggccttgtgaccaaccgggcgcttccggggactgatccgaaccaaaagattttatatacatcgatttacagctcagcggacttaatcgtcctgaacccgctgtcacggctgatcggcgggaaaaacgtgcagattcacggtgtcggacacatcggacttttgatgaacagccaagtaaacgggctgattaaagaaggtctgaacggcggcggacaaaatacaaattaacagtttcaaagccccggagaatgagaatatcccggggtctttttttcttccatattcttttttcgccgtaaaccaagccctctgaagttatttttgttaaaataataaagttatatcagaattcggagggtttattgtgggaaaagtgaaaagaaatgccccttgcccatgcggcagcgggaagaaatataaaaaatgctgcggaagcaaagaagctgccattccggcagacatcgcggcaaaagaagcgaaacagattcaggaaagcctaatggagtacgcctttacagcacatagagacggcatatcatcatttattaaccagcacgcgttcattacggagctggacagacagacaaaagacatcggagtcttcaacctcggcatctggggaattttcttccgtccgctggcaggcggcaagacgatttttgaagaatatcttcagaaaaaagccggcggcatcaaccgcccgaaaacacgggaaatcgttgaatcatggaaaagcatgacacctgccgttatggtgcttgaagatgtgaaagaaggaatgattcactttgaagatgtgatgacgaaaaaacaattcaaagtggaaatggacgtcagccagcaggatcttccgccggcgggaagcctgattctcggctatccgatccacgaagcggaaaaagcggagttcttcatgcaatttacgatcttccctgtgaagcggaccgaagctctaatcagcaaagtgaaaaaggcggctgccccggctcttgcggaaggaaaatcgcctgagcgctttatgcaggacaacttcgacattgtgctggccgctcttttaggaacggcggaagagcctgagcaggctgctgaagaaaaacagacagagtgggccaacgacatggagaaggaaacggcagacgccattgaaaaaggcctgagcggggatgaatacccggctgagctggttccggccgttattgatctgtggaaaacgttctgtgtcaaaaaaacaccgacgatcagaaagcctgaagctttcgcggcggcggtcgaatattacgtaaacagcatttctctgaacggcgcgtccgtttctcaagcgaagctggcgaagaagtacggcgtcagcgcctcaacgatttccagccgctataaggaaatcgagggtgctctcacggatgaagccgaacgcttcgccgcagctctgacatcttaatacacagccaaaaaaaccttgaagggcaaacgcttttcaaggttttttctgtagataggctctcaggcaggataattcttaccgtctatctaatactaaacagagcgataaaaagaagggagcctgagccatggatgagacacgtacgctgggcaggacggatttacgggtaaagcgtatcggttttggcgcaaatgcggtcggaggacataatctgtttccgaatcttaatgatgaaacgggaaaagaactcatccgcacagcattggacggcggcgtcaattttattgatacggcgtttatatacggtttggggcgttccgaagagttaatcggtgaagttgtcgcagagcgcggcgtgcgggacagcctcgtgattgcgtcaaaaggcgcgcataaagaagtcaacggacaaatcgagctggacaacagccgtgaatttctccggagtgaggcggaaaacagcctgaagcggctgaaaacagacgtgattgatttgtattacgtccacttccctgacggcaaaacaccgctctccgaagtggcgggcacgctaaaagaactgaaggacgaagggaaaatcagagcaatcggcgcgtccaatctcagcttccggcaattgcaggagtttaacgccgacggctatttagaggtttttcaatcggaatattcactgattcagcgtgaggcggagcatgatctgctgccttattgtgaaaagaacggcatttcctttattccttattttccgcttgcttccggcttgctgacgggaaagtttacaaaagacacagtctttgaggacagccgaaagaacaggccgccgtttcagggggaagcttttcgccaaaacctggagagagtggataagcttcgggccgttgcggaggaaaaaggggcgcagacagcgcatatcgcactcgcgtggcttctgtcgcagccggcagtggatgcgatcattcccggagccaaacgccccgaccagctgaaacacaatctggacgcgcttcatgtgcagttaaccgaggatgaggttcaatatatcagtgacatctttaagtgaaaataaaaaaaggaaatagcctgcgctatttcctttcttgttgtcaggacgttttcaaaaacgcttctgtcaatccttccagatcggcgtctgtatccagataccactggccgcgggcgtttttcttcatctcaatttctcttgtaacagaagaagaagccggtttcaggcgcataaactcttccggatagacagaaagcaggtggctgacaatttcgttttcatcagcatcagggtgctttccggcatagtcttgcacgcggtcttgcagctggcccgcaagcggagacatatcaagcggcgtcacttttgcttcaaggacggcttttttgcctgacatggatttggtatgcaccttgagctctgtgttatcccgaagcgctgatgacatggcgtcaataatagcggaaatggcttttgaatccgcctgttcttgtgaaatgcctgcagaagcgataaagctggctttcgccgattcctgatatgcggcggccgtcattttttcatttacaccggtcaggcgggtgaaatctttattgtgcttgccgtacagcatcacatcaatgtatgcggataatgcgtccgccgggtcaggttttgcgttggaggctgtgcctttgactttcagtttataagataaaggcttcgcgtcttttgcctgcggctgatataccaattcataggatttgccttcgtcagccgtgaagtacagattgcccgtcactgtcttaccggcatgaagcgtgccgctctgcatcaagtcttccttatcggccttggctgttttcgcgtcatcctgataaagtgagaagtcgctgcttttgacggtaagcgggtctttgcccgtatttttgacggtgaccgttactttcagcgcggccggatgttcagtatcgtctgaagcggcccatgccgtctcttttattttcactttcgccgtgctgctttcctggccgccgctcgtttcgctgctgcatgcggcggtaaatgccgtgagaagcagaatgaaaaacacggcgctcatttttttgatggacatctggtttaccccctgttgttaatgattaattcgatagtcatgaagacagacaggttaattatactagttttgtataaaagagtcttggtaatcatcaatctttttggaagaaaaggaagtgttatgatgaataaagaagaattgaaacagctggctctccgaatcggaaacgtacctgcccgctacgagagtaatgtggaagaataccaggaagatgaggttctgttttggtgggaagataagaatgatccgcaagccggcatcatggtcgaattagaccgggaaggaaaactgaaatacttatcccgtccggctttccagactgatctgccggctctttcggaatcggacatagaagaacggatgcgggcgtttttagaaacccatcgtccgggggcattggctgagtttgaaccggaaaaaaacggacccgcaaatgatggcgatgtgagatattcctatgttcagatggctgacggtctgccgcttccgctgaccgggttttacatcgacctggctgtgacaggggaagtaaccggcttttcttaccatgggaaggccgatgatctgttaagaccggagacaattgcggacaagcgggaagcattggctcactttgtcaaacatattgaagcagagctgttgttcaccgtcctgcatcagtccgtctatgtgcagggggatgacaagccccatctcgtctatgaaatcgtgtctccgacgcggccgatatcggccgacctgaaggaagagaatgcagaattagacgaatatgaagagctggaagacggcacgcggccgtatgtcccgatttcacgccctgcacctgaagcggaaaagatgagcatcaatgacatgatcgggctgcacgacggtttttataaagagagggaaagcgatcttggagagggctgtatcggcattgcctggcgtcctgaaaaaacaaaatccgtgcgggaagataaaagctttgaaagtctgtttaaagaacggaatgaacacgtattgaaaacaagatatgataaagaatcgggccggctcaccggggtgatgtcatttataaaagttgaaggtgaatcggtgttttccgaggaagaatgccatcacatggccatccgctttttattcgccatgtttccggaagcggatcagtatttccgggttcaatatgatgaaccggatgatgaaggagaaaacgtgggacttacatataaggcttgttcgggcggcgttgatttgcgattcggagagggaagaatctgtgtcagcaaaaagacgggtcttgtcactttttatatgccgccggaaattgatccgaaagagctcgaggaaatcgatcccgttccttcattgacaatggaagaggcgaaggacgcgatccgccgggccatcaaagcagagctcgcttgggaccattgttacgatgacggcagctgcggaaaagtgtacaggctcgtatacaagccggttttcccgcggtttattgaggctcatacgggagaagcgatcacgagtttaataggctgaaggtcatgggcatccgtcccggggctttcacggggaatgtgacatttgtatgaaaaagtgccgctcagaatacggctcttttccctctttgctaaaaatagacacataaaaggcactttcttccctttaaaaggataaggacgtttttatataataaaaaacagttcttttttatacactcttctgaaaggatgaccccattgctgaaagaacatctaagaaaaaaagcgctggatatcgggaacataccgccgcactatgagcttgaaatagaagattatgatgaaaaacaaaaaatgagagcctattatatatggaaagatcgtaaccatccggataaaacggtcacgattgagctgggcgacgacggatctttgcttacctattcacgcaacgactgcccgggttcagacatgaagctgtcagacgccgaattaaagctgacggctcttcggtttgcggcgagacaccgcccgcttacttttatgaatttcatctttcaggcgagggaagaacgcaatgggtgcatccgatttatctatacaaaaaaagtgctcggccggccgcttcccgattcaggttttttcgttgatgtaaccaggagcggcttcgtcgtgcagtttatctattacggggataagggtgaagcgcccgtcccggaaacattcgtcgatcgggaaaaagtcgtctcgcattacatgagtgtgctgacattcagtctcgtctatgatgtggtcaattttgagaaaacaccgcgtctcgtctatgaaccgattctgccggcttacagctatccggccggtgaagatgatatcgtgccggatcagcagctttgcgaagacaggaatgagccggcaaaaccgcttcccgcgtttgaacataaacgggaaatcagcctggatgaattaatggggtttacctcggatatggttcagacgcgccggcgcgatctcggggatgagatcggaacgacatggcggaaagggtcggttccggaacggaaagatttgagtatcgaaagctattttgaaagcagcaacaaaaatacaatgaagatgaaaacggacaaaaagacagggaaaatgacagcctttaaatcttttattgagcatcagggcccggccttttattctgcggaagagtgtgaggccgtcgcgcttcaatttttatacaaactttatccgagagcggacgagttttttaaaatgaacccggtgaaaacggacggaaggggcaggttccgcttccatttttccatatggcatcaggatattccgctgcggttcggcgctgcgagaatacttgtcagtcccgtaacggggcttgtggaagcttacatggcgcctgacattgacccggagcagctggagaagatcaatccggtcccggccgttactcccgaagaagcaaaggccgcttttttatccgatttccatctgcggctggagtggcagcgcgattttacgccgtccggcaatgaaggatataagcttgtgtacaggcctgtctatcctccgtacattgatgcgcaaaagcgaaaaaagaaaaggttttattagccagggatcatctgtaaatgaggataatctttaaagcctctccaatcgcctccccaatcaaaaccgagcgttttggcaatcgatacgacctcaagccaatcgggcgtgccgtttcggtttccgtcgtacgtcatatcccaaatcaggcttccatcctttttttgcagggcgaagtcgatcgcaaggccgtaattgtggtaagattccccgccttttgcgtaggtgacgatatttcctttttttgaacgtccttgacggtacaattcgttttgttcctcaattgatctgaaaccctctgtgataacgacggtgatgccttttttcagagcggccgtctgcaatagctccgcattctgtttcacgagcggatgaagagcgcttggaatggctctatcttgtaatgccgtctgcggcctcaattctttctgcacataggaaaaacataggtctgcggaaaagaagaggatcaaaagcagcgcaattctgactggtcgtttcatggtgaattctctctttctttaattgattaaaatctttgtttgctcactgccataaatttgctatgataaaatataacataattagtagccggaggaaggaggcaaatctatgaaatccaagattccatctgaagaagtggccgtaaagatgaatgaatggtataagctgatccgcgcgtttgaagccgatcaagctgaagcgctgaagcgggagattcaatatgaactcgaagatatggaagagaaccaggatttattgttgtatttttcattgatggaatttcggcaccgcatcatgctggataaattaaaacccatgaaagacggcgactgccagcctccgttctctgaaatgctcactgagattgagatgaaccagcaaaagctgaccggcttactggaatattatttttactatttcaggggaatgtatgaatttaagcagaaaaacttcatctcagcgatttctcattataagcgggctgaggaaaagcttgaatatgtggaagatgacatagagaaagccgagtttctgtataaaatttctgaggtgtactatcatatcaagcagactttcttttcgatgaattacgcggggcaggcgcttgatatttacaagaaatatgaattatacggaatgagaagggtgcagtgcaaatttatcattgccggaaatctgatggacgcccagcagcataaaaaagcgctggaatacctcaaatgcgccttggaacacgcggagcggcttgatgatcaatatatgattgctgcggcctattataatatcgggcactgtatgtacagtctgggtgatttttgcaaggcggcggaggattttgaacgggcggctgccggatttgaagcacacagcttccggcaggtcatccaggctgttttttcactcacgcatatctactttaaaacggaaaaatacagtgaagccgccgccagctgcgcgcggggcatgagaagcgcggcggagtgggaagatgagatctatatgacgaaattccgtctgattaaagagctttatcagggggaaggcggacaggattcgctcaaagagtattttgacattctggaatcaaaagagctgttggctgacacagaggaactgcttcaggacgcggctcatttctttcatcaacgggagaactacaaagcggcatcttattttttcagcaggcttgtcggcgtgcaaaaaaggctgcaaatgaacaactacgcataatgaaaaaaagaacgagggagcttcggtttcatcgttctttttatgattccttttgttttcagccgattaaaaccgggtacatgctctgtattaacatcagggaggaaatgagacaatgtatcaggatttacagggaaaaacagcgatcgtaacaggttcttcgaaaggaatcggaaaagccattgccgaacgcttcggcaaggagcggatgaatgtggttgtgaactacctcggtgattccgccggagcggaagaagcggcggacatcattgagaaagcgggaggccgagccgtcaccgtaaaagccgatgtatcctcagaagaagggattcaggcgctgtttgatgccgcccaggagcatttcgggggtgtggacgtgatggtcaacaattccggctttaacggggccgaagcgatgccccatgaaatgagcttggaggattggcaaagggtcatcgacgtcaacgtgaccggcacctttttgggggcgaaagcggcactgaaacatatgctcgatcgcggcaaaaaaggaacggtcttaaacatatcgagcgttcatcagcaaataccgcgtcctgaaaacgtgcagtactcggcatccaaaggcggaatcaaaatgatgacggaaacgatggcgctcaattacgcagacaaaggcatccgggtgaatgccatcgctcccggcacgatcgccacggagtccaataaggatctggaagatgaaacacataaacaggcccagctgaaaaaaattccgatgaacgccttcggaaaaccggaagaagtcgccgcggccgccgcatggatggtgtcggaagaagcgagttacgtaaccggaacgacacttttcgtcgacggaggcatgacgctttatccgtctcagctggaaagttaaaagaggaggggaaaccttctcttttttgtttaggaaaggattataaaggaaatggttctctaaaaaacaggaggggccgcaagatggagaatgactggtggaaagacgccgttgtctatcaaatctatccgcgaagctttcaagatacgaacggcgacggcattggcgacctgcgggggattatcgcgcgtctcgattatataaaagaacttggcgctgatgtgatatggatctgcccgatttacccgtcgccaaacgtcgataacggctacgatgtgacggatcatcaagcgattatggaatcttacggaaggatggaggactttcacgatctgcttacagaatgccacagccgcggattaaagcttgtgatggactttgtcttaaatcatacatccacagagcatccttggttcaaagaggcggaaatgaatccggacagcaaataccgcgattattatatttggcggccgggcaccgcggacggcccgccgaccgattgggtgtcggattacggacaatccgtctggcagtacgaagaacatacgggcgaatattacctgcatatgaacgccgtcaaacaagccgatctgaattgggaaaaccccgaagttcggcaatcagtatacgagatgatgagattttggctcgataaaggcgtggacggattgcgaatagaccagctccatcttctgtcaaaaaaagaatacttgccgccatatgaagattacatcgcccgccgggccgatccgaagcctttccggccaaacggagcacggatacatgattacttaaaagaaatgacgaaagaggtattttccaaatatgacgtgatgtcggtcggcgaggccggatcagtgacgcctgaggaagggctggtctacacgggaaccgatgagcatgaactgaatatgatttttcattttcagcatatggagcttgatcaaaagccgggccaagagcattgggatgtaaaaccgcttgagctgtccgatttgaagaaagtgctcacagattggcaggaaaaactggaacatcaaggctggaatacgctgtattggtgcaatcatgaccagcctcggatcgtatcccgtttcggagacgaaggcacataccgcaaagcatccgccaaaatgcttgccgccctgctttatttcatgaaaggcacgccgtacatttaccagggggaagaaatcggcatgacaaacgctccgtttgacagaatagaggattatcaagatattcagaccgtcaatatgtatcataaaagggtatttgaaatgggtcggaacagggaagaagtcatggcgtccattatggcgaaaagccgggaccatgcccgtacaccgatgcagtgggacggcagcaagaatgccggatttacggagggcgaaccgtggctcacggtcaatcccaattacaaaaccgtcaatgcggccgaggctcaggatgatcccgattctatattgaacttttacaaaaaactgatccgcctgcgaaaacagtatgctgatatcataaaaggcagctacacgctgctgcttcctgatgacccgcagctgtttgtgtatgaaagacaggcaaacggacaaaaactcatgtccatcagcaacgtatcgaaagaagaagccgccttttattggccggacggctccgaacctgaaagcgccgagcttcttctcagcaactatgaaaatgacggcggcgcggaatcccgcatcgcattccgtccttatgaaacaagagtttatctgcttgcctgatatgtgataggactcccccgtccatacatggcgggggctttttaggtaaattggatattaatttagaaaaaaatatcttgcaaaacgtaattacttcgttttattatggtataggtaacaaatgaacgagaaagaacgctttggaaatcgtcatcattctgatttacagaacagggggaaacggcttgttaaaaaaatggagcggaatcattgtcattgcggcatgctttttaatcgcggcgggctgcggcaattcaccttcaaaaggttcgtcaggttcttcaaaaagcggcaaactgcacgtcgtgacgaccttttatcctatgtacgaattcacgaaacaaattgtcaaagacaaaggcgatgtagacattctcatcccgtcttcggtcgaaccccatgattgggagccgacgccgaaggatatcgccggcattcaaaacgccgatcttttcgtatacaacagcgaatatatggagacatgggttccttcagcggaaaaaagcatgggctctgatcatgcgaagtttgtaaaggcgtcgaaaggaattgacttactcgaaggttcggatgaagaggaagaggaacatggacacggcggtcatgaccacagccacagcatggaccctcacgtgtggctcagcccggttcttgcgcaaaaagaggtcaaaaccattacggcgcagattgtaaaacaggacccgaagaataaagcatactatgagaaaaatagtaaagaatatattgcaaaactgcaggatcttgataaactataccgtacaacattaaataaagcggcgaaaaaagaattgatcacacagcacgcggcattcagctatctcgccaaagaatacggcttaaaacaagttgcgattgcaggcctttctcctgaagaagagccgagtgcggccaaactggcggatctcaaaacgtttgccaaacagcatgatgtgaagatcatctactttgaagaagttgcatcgcctaaagttgcagatacgcttgccggtgaaatcggcgcgaaaacggaagtgctcaatacactggaaggtttaagccaaaaagaacgggataaaggcatcggttatatcgacattatggagaaaaaccttgatgcactgaaagattcgctattggttaaataacatagtgtgcgccgcggggtgcacactatttctatgcgggaaaggaaggtcagcatgaatctcgttacattacaggatatcgtttttggttattcgcatacacccgtgcttgacggcgtgtcgctggaaatcaaaagcggcgaattcgtcggcattacaggaccgaacggcgcgtcaaaatcgacgctgatgaaagtcatgctcggcatgctcagaccttgggaaggaacggccgagatcagtaaaaaaaacgcagccggaaaacgcctgacaatcggctatgttccgcagcagatttcttcatttaacgcaggattcccaagcacggttctggagcttgtacaatcaggccgttatacgaaaggaaaatggtttaaacgattgaacgaaacggatcaccacgaggtggaaaacgcgctgaagatggtggaaatgtgggatttccgccaccggaaaatcggcgatttatccggcggacagaagcagaaaatctgcattgcgagaatgcttgcgagcaatccggatctgctgatgcttgatgagccgacaaccgcggttgattatgaaagcaggcagggtttctacgaatttatgcaccatcaggtgaaaaatcacaaccgcaccgtcgtcatggtgacacacgaacaaaacgaagtacagcagtatctggataaagttatacggcttgagaggggggaaaaaggcggatggaaatgtttgacttggaattcatgcgacgagcttttctagcgggaagcatgatcggaattatggcgccgatattaggcgtatatctcgtgctgagaagacaggcgctgatggcggatacgctgtctcatatttcattgtcgggcgtggccatcggtttttttctcagtaccaatattacggcggcgagcatcgttgtcgtcacgatcggagcgatcggcattgaatacatgcggcgggcgtaccgtacatattcagaggtatctatcgcaatcttaatggcggccgggctgtcgtttgcgatgtttctgatcagcctgtcaaaaggcggcgcgtcgatgagcatcgatcaatatttatttggatcgcttgtcacggtcagccagcagcaggtctatattatcggaggcattaccctgctgattctgctttatttcattatattaaacagaccgctctatctgcttacttttgacgaggcgacggcgaagacatcaggcattaacacaaacctgctgtcaatgtcattcagcatcgtgacggggctggcgatttcggtcattattccgattatcggcgtgctgctcgtttccgcgctcctcgtactgcccgcggcttttgcaatccgtatcgccaaagggtttaaatgggtgtttgcggcagccattattatttctcttttcagtgtgttcatggggctgacgtcttcgtaccagctcggaacgcctccggggccgtcaatcactttactgttaatcattctgcttctgctcggctttatgctgcaggggatttggaatgcgtttaaaaaaggaaaagaacgaaaaaaccgccgttaagcggtgcagcagtctcatctgctgctccgtttgacggcttttttttacagaaatatatcagcaagacgctcatatgactctttttttgcttcgaaatcaaagacgttgcacagcaccatcatctcttttgtctgataccgctcggaaagttcaagcagacggcgtttcactgcggcaggagagccgatcaccatccgcttcctgttttcttctatctgtttacgatcctccggcgaatacggataagccttcgcttcttccacactcggcacgcggctgtcggcgccttttccgacacgaagaagccataaatcctggcttaaggcgagttcttccgctttctcatccgtagccgcgcatatgacgaaaatggcacagagcgaggcgggagcggaaaaatgggcggaggcccggaaatggtcccgatagatctgaaaagctttttccccgcgttccggattaatgaaatggccgaagacatagcccgcaccttgaagagcggcgcgtctggcgctgttttccccgaggccgagcacccaaagctgcggggctgtttcaatcaaaggcgctgtttttattcctgcataagcatggtccgagggaaccgaatctgtcagaaaggatgataaatcctgaagctgcctgttgaactcggtcatgcttttctttaccccgtctgtgagggcgagccggattttcgtcgtgccgcccggtgagcgtccgaccccaaggtcaatccggttcgggtgcagcgcctcaagctgacggaaagtttccgcgactttataggggctgtactgcggcagcagcacgccgcctgatccgacacggatggacgttgtggctgcggcggtatgagcgatcataatttccggcgaaacgcttgcgagccctcttgtgccgtgatgctcggcaaaccagtaccgcttatagccccatccttcactgagacgggcgagctccgctgaacggcggagcgtctcgtgcggcccgtttcctttggatacgggcgcctgatcaagtatgcttaaatcaatcactcgtctgcccctttcctgacatgtattgatacaaggataggaaaaatgttcagtcttcgtcaatttctttgttttctctattctctccggaacgaaggagaatataggaagtaatttttcgccgtttttcgccaaaaattcttatgttttatgaaactttgatataataaaagacgtatatcttaataaacaccgggattcttgtcccggaatttagtaaaaatgcgcacttgcggcgtgcttagcggcacccttacagaataggagtgaatcatatggcgatctctttacaaaaaggacagcggattgatttaacaaaaggaaaagccggcctgtcaaaactgctggtcggactcggctgggaccctgtatcatccgggggctttttcggaaagctgttcggcggaggcggtgccaatatcgactgtgacgcttccgtactgatgcttgaaaatgataaaatgacagacagcaaaaacgtcatctatttcggcaatctgaaaagccggtgcggcggtgtcgtacatacgggtgacaacctgacgggtgaaggcgacggcgatgatgaacaaattctcatcgatttggcgaaggtgcccgctcagattaataaacttgtgtttgtcgtcaatatttacgactgcgtcagacgaaaacaggacttcggcatgattcaaaacgcgttcatccgcgtcgttgatcaggctaatcgcgaagaactggtgacttacaatttaagagataactattcaggcagaacgagcctgatcgcggctgaaatctaccgccaggacggcgagtggaaattcgccgcagtaggagaaggcacaaacgatacaaaaatcggcgatatcgttaaccgatacgcctaaacgataaaaaggagagtgcacacatggcaatttcattggcaaaaggacaaaaagtagatttgactaaaacaaatccgggtctttctaaagtcgttgtcggccttggctgggatacaaacaaatacgacggcggacatgattttgatttagattccagcgtctttctattaaatgaagcgggaaaatgcgcgtcgcctgatgatttcattttctataatcagcttgaaggaggaaacggctctgtcgcacattcaggcgacaacctgacaggccagggcgaaggcgatgacgaaagcgtaagagtcaacctgagcgcggtgcccgcggctattgacaaaatttcattcgtcatcacgattcatgaagcggaagcgcgcggccaaaacttcggacaagtttccaacgcgttcgtgcgcattgtcaatgaagagacaaatgaggagctgatccgctatgatctggctgaagatttctcaattgaaacagccattatcgcaggggagctttacagacataacggcgaatggaaattttccgcgatcggctcaggctaccaaggcggactggcccgtattgcgacagattacggcctgcaaatcggctgaaccttatcaaacacagaagggagagacggcacatggctattcaattggcgaaaggacagcgtgttgatctgacaaaaacgaaccccggccttacaaaagcggtgatcggcttagggtgggatacgaacaagtactccggagggcatgactttgaccttgacgcgtcggcttttcttgtcgatgcccatgacaactgtgtaaatgatcttgattttgttttctacaataacctggaacacccgagcgggggcgtcatccatacgggagacaaccggacgggcgagggcgagggagacgatgaacaaattatcgtcgacttctcaaaaatacccgcaaatattgaaaagatcggcatcaccgtcacgattcatgatgcggaagcgcgcggccaaaatttcggacaagtttcgaacgcgttcgtgcgcgtcgtcgatgaaaacagccagaatgaactgcttcgtttcgatttaggggaagacttctcgattgaaacggcggttgtcgtttgtgagctttaccgccatggggctgagtggaagtttaacgccatcggcagcgggttttccggcggtctggcatcactttgccggaattacggcttgcaggtgtaagcaggaaattaccgttttactaaataggaggaaaaaacttggattttctacatcatattatgtctacctacgcttccttttttgattggaaaatgtggggtgaggtgctgactgaccctgtatcatgggggctgatcggttccttggttctgctggaagggctgctgtcggccgacaatgcgttagtgcttgcggtgatggtaaggcatctgcctgaaaaacagcggaagaaagcattaacatacggattgttcggggcatatattttccgttttatctttatcgggatcggaatgctgctcattaagttctggtggattaaagtgcttggcgcgctgtacctggcttggctcgtcattaagcatttctggatcggagaaggtgatgacgatacggaaggcatgaagaaaaattcatggatggtccgtacgttcggaattttctgggccactgtcgtttcagttgagttaatggatttggccttctctgttgacagcattctggccgcgtttgcggtatcggaaaaagtgtgggtgctcttgatcggcggtatgcttggcattctcatgatgcgtacagtcgcaaaagtattccttgttttaattgataaaatccctgagcttgaaaatacggcttttgtgctgatcgggattatcgccgtgaaaatggcggcgagcgcctttgattatgaaatgccgcacgtggtgttcttcggaatcatcatcgctgcgtttgtggtaacgtttattatccactatttcaacaaacaaaagcaggttcaggagcaaacggctgcatctaaagaagaataaaacaaaaaaggagggagagttcatttccttccttttttgtaccgatcatcatgaagagaaaggaggaaaatgatgaggcaggaagaattggtgatccgaaaggccgagccggaaaacgatgactgggaaacgtttctgatgcggccgctgccggaacgtcccggttacgagcgggaaaacgggctggcgtttacccgtcttgccgtccggattttgggcactccttatgatgagacggagtattacaataagcttttcgagctgtcttctcacgaaaacatccatgtgttaagcgagacgctggataagaccatcgcgcctgaaacgtttcaggcgctgcagcacatccattcggtcaatcaaaaagagaaagggctttcggtttccaggtttgtcgcgtttctcgatgggggcaggctgcttgccaaacacgctgatccgcttatgcatcgccggctgagaaccgcgtttatgacgcttttggaaacctttgcggaccggcatgaaaacgggctgaatcatcccgatttccggcgtgtgctcttggatgtgtcaaagttttcgctgaaccacctgaatccatggctcgaacaagccgatatagagcgtgagatgccgaaggtggtgtggtatggagacgctgccaaaagccagctctattttctctattatataatgctgatcggctgtgacgtcctattgtttcatccggctgcggaagatccgttcagcttgattgatccggatgaggaactcagctttgtgataaagctccccgcaacaggcggccttgagccattcccgaaagaaaagccggacagaacgtccacgacggcctaccggtcaacgaaagaaattgagcatgtgctgaaccatgaggaatctatgatgtataagccttggcagttcagggatcataccccgcagtccgtgacattaaaaacgacgtatgatgagttatttctcattgcgaaggagcgggcgtttatccggccgcaatttaaagcggacagggagcgggtggccgttccgaacctttttgcgaaagtgatgggggtttccaaagatacgaaagaatattggaacagactccataccgccgcagactatcaggagacacacatgatccgcagttttccgtttacggaagagctgaaagccaactaccagtatcactacagtcaggttttgaacgaagaaggagcgattgacgcggacaggctgaaaagaagcaacatctggcagtacaagcatctcccgtcaggcgtgcagaacgccatcgccaatgtgatttctgacatgtgcagaaacccagggctgaaggctttgcccggggagcaggcaagggatgccgcaatctatttgttccgccaggcgacgaacctgcccgcttcgctgctgcaattgattcagacgtttgattacgcccaaaccgttccgaaactcgttttatatcatacggaacaaaatggcgaacttacacgttctgacgccgccgctctgttgtttttaaataaattcggcgtcgatatcatcttgtataatccgccgggccatcaggacattgagcattatattgaagaaagccaatttgatgtccattggctggaggacatggtgtttcggcaggaatataaggagccgtcactcgtaagaaagctgtttagaaccattacgcaaaagcagggagagtaaatagtcatgacagaaaatcaaaatccgcttgttcttgataaaaatgaagagatttctgaacaaaaagcagatgacatcagggtgcagctgcgccaagaccctgaggtgcagcgcatttcgcagcagattgacgtgaaaaaccaaatggagctgcttgagtacggaaaagaaccggcagttgaaatctcgaagttctccgaccgcatcttaaatatgatgaaaacaacaagtgtcacggattcaggcacaatgctgacgcagctcggaaaaatcatggaccgtttcgacaaaaatgatttcgatgaaccaaaaggatttctcgctaaaatgttcaaacgcggcaacagcatgattgaaaagatctttcaaaagtaccgcaccctgggcggagaaattgaaaaaatccacgtcgaaatttcaaaatacaaagatgaaatggcaaagacgaaccatacgcttgaagagatgtatgaaaacaacattaactactacatggagcttgaaaagtatgtcgttgccgggcagatgaagcttgaggaaatgcaggcgctcattccttcttatgaagaaaaagcggccggcggaaaccagcttgcgcaaatgcagcttgatacgctgcgtgacgggcttcaggcgcttgaggaacgtgtgtatgatttagatatggcgcggatggtggcgctgcaaacggcgccgcagatccgcctccttcagcgcgggaatacgaagctcatcgggaaaatcaattccgctttcgtcattacgattccgattttcaaaaatggcattattcaggctgtcacagtcaaacggcaaaagcttgtggctgattcaatgagcgagctggaccgccgcacgaatgaaatgctgaagcgaaacgctgaaaatatctcaaaccaaagcgtggagattgcccgtatggcaggccgtccgagcattgacattgagacgattgaaacgtcttggaatacgattgtcagcggtatgcaggaaacgaaacagatcgaagaagagaatagacgtatcagagaagacggcgcgaaacggattcaacagcttcaggataatattaaaaacgcagtcttaaagaattaacacacaccccgcttgcttacggcaagcgggatttttttgcgaaaaaagataatgacaatgtgtaaagacaggtgtaaacttatacggtaatcattttcgatttgaggtgctgcttatgaacaaacaacctgccgtcactccgcgaaaacttctggcgattgccggaatgggctggctgtttgatgcgatggatgtcggaattttatcgtttattatcgccgcgcttcacactgattggaatttaacacccgatcaaatgaaatggatcggaagcgtcaattccatcggtatggcagcgggcgcctttgtattcggaatgctggccgacaggatcggccggaaaaaagtgtttatgatcacgctgttattcttttctgtcggaagcggcatatccgctttcgcaacgggattgacggtttttctcatattgcgttttctgatcggaatggggcttggcggggaactgcctgtcgcctcgacgctcgtgtcagaagcgtccgctcccgaaaagcggggacggatcatcgtgctgcttgagagcttttgggccgcgggctggcttcttgcggcggtgatttcctactttgtcataccgtcattcggctggcaggccgcgctgctcttaacggcgctggccgcgttttatgcgctgtacttgcggaaaagccttccggaatcaccggcgcatcaggcattgccgcagaaaaaaagcatacgcgggcaggcgggaagtgtctggacgaaaccgtatatccggccgacggtgctgctgtctgtcgtttggttctgcgtcgtcttttcttattacggcatgtttttatggctgccgagcgtgatgctgatgaaaggctacagcatgattgagagcttcgaatacgtccttctgatgacgcttgcccagcttcccggatatttctctgcggcgtggctgatcgaaaaagcggggcggaagaccatcttagtcatctatttgctcggaacggcgggcagcgcttatttcttcggtgccgcggattcattggccatgctgctcacagcgggcatgctgctgtccttcttcaatctcggcgcatggggcgtgctttacgcctatacaccggagcagtatcctgcggcgatccgtgcgaccggttccggcacaacggcggccgtcggcagaatcggcggcattttcggtccgcttctcgtcggatcgcttgcagcccggaacgtttcgtttacagtgattttcgccgtcttttgtgcggccatcctgattgccgtcatcaccattattattctcggaaaagaaacgaaacagacagagcttgcgcaatgagcacccttttggggtgctttttttagtgagctgtctgttgacagacctatatttttccttaatattcctttattttaggaggggaaaacttctttttccgggacaatgtcgcgaaaaaattcttgtttttgtaaaaaaaggataggaaatcagtttgcagcacattcgatggaagtgttctcaagcctgataaaagcccgatttcctttataatttatcctcaataaggaggattagagagtatttagaagcataccagaggaaaataagacacagggatgtttttaaagtaatgatacaaaataaacgggattatgatgtttgtttgacttattacaaacgtgttacggtattaaagattgcttattatggagggaaaatatgaatttggatgagaaaccaattaagataaaagtcgaaaatgtatctaaggttttcggaaaacagacaaaaaaagccattcagatgctgtccagcggaaaaaacaaaaaagagatcctgaaagcgaccggatcaaccgttggtgtcaatcaagcaaactttgatgtatatgatggggagatatttgtcatcatgggtctatcggggagcggtaaatcaactttagttcggctgttaaaccggcttattgaaccgactgccgggaatatttatattgatggtgacatgataacaaatatgtcaaaagaccagctccgggaagtgcgccggaaaaaaatcagcatggtctttcaaaaatttgcactgtttccgcacagaacgattcttgaaaatacggaatacggcctggagcttcaaggcgtcgacaaaaaagagcgtgagcaaaaagcgcttgattcgcttaaacttgtcggtcttgaaggctttgaacaccaatttcctgatcagctcagcggtggaatgcagcagcgtgtcggacttgcccgcgcattgacgaatgatcctgacattcttctgatggatgaagctttcagtgcgcttgatccgctgatccgcaaagacatgcaggatgagcttttagaccttcatgactctgtcggcaagacgatcatcttcatcacgcatgatcttgatgaagcattgcgcatcggcgacagaatcgtgctgatgaaagacggtaacatcgttcagatcgggacgcctgaagaaattctgatgagcccgtccaatgaatacgttgagaaattcgttgaggacgttgatttatccaaagttctgacagcgggccacatcatgaagcgcgctgaaaccgtgcggattgacaaagggcctcgtgtagcgctgcagctcatgaagaatctcggtatttcttctatttacgccgttgataaacagaaacagcttctcggcgtcattcacgcggcggatgcgaaaaaagcggtggaatccgacttatcgcttcaggatattctaaatactgaatttacgactgtaaacgaaagcacgtacttgacggaaattttcgatgtcgtgtctgatgcgaatattccgatcgccgtcacggacgataaggaccgcatgaaaggcattgtcgtaaaaggcgcattaatcggcgcgctttcaggaaataacgattatataaatgttgaagattctgctgaacaagctcaggattcttctgttcagggggtgaagtaaatggacagattgcctagaattccgttagcagatatcgttgaccggtttgttgactggcttaccatgacgttcggaggtttctttgacggaatctcaaacggtttggccgctttcgtaaacgcgattgtgagcggtttgggtttcatcccgtctattttattgactgttatttttgcagctctcgcttggtggatcagtacgagaggaattgcactctttacgttaatcggattccttgttattgattatttgggttattggtcgccgatgctgcaaacgttggcgcttgtcgtcacatctgttttgatttccattattatcggggttccgatcggcatatgggcgtctcagaaagaaacggtccgccgcattgttacaccgattctggatttaatgcagaccatgccggctttcgtatatctgctgcctgcaattttcttctttaatatcggggttgtgccaggcgtcgtggcatctgttattttcgcgatgcctccgacgattcgcatgacggttctcggtattaaacaggttccggctgatctgattgaagcgacggaagcattcggttcaacgacgtctcagcgtctgttcaaggttcagcttccgcttgccacaaaaacaattcttgccggtattaaccaaagcatcatgcttgctttgtcaatggtcgttatcgcggccatggtcggtgcgccgggtctcggttctgaagtatacagcgccgtgacacagttgaaaaccggtgtcggagtggaagcgggtatcgcgatcgtcatcgtagcgattacactcgaccgtatcacgcaaaacattaaagtgaagaagaagagcagggggaatgcctgatgcttaagaaaatcatcggtgtcggcgttaccgctgcgctggctctttctttggctgcctgcggttcgcagactgatggtaaggcaacggctgcggaccaggtgaacaaaaccattatcggtattgatccgggatcgggaatcatggccctgacggatgaggccgtgaaggattacggattgaaagactggaatgtcgtcacggcgtcaagtgctgccatgacggcgacattgaagaaatcatatgaccggaaaaagccgatcatcgtaacgggctggacgccgcactggatgttctccagatacaagctgaagttccttgatgatccgaaaaaaacgtacggaactgccgagcagattcatacgattacaagaaccggcttcagtaaggaacagcctaacgcggccaaagttctcagccagttcaaatggacgcaggacgatatgggagaagtcatgattgccgttgaagaaggcgaaaagccggccaaagccgctgctgaatatgtgaaaaaacacaaagaccaagtggctcaatggacaaaaggcgcccataaagtcaaaggggataaaattaacctggcatatgtggcttgggacagtgaaatcgcaagtacgaacgtggtcggaaaagtatttcaagacctcggctatgacgtgaagctgacgcaagtggaggccggaccgatgtggactgcgattgcgacaggcagcgcggatgcgtcattgtctgcttggcttccgaatacccataaggcatatgcgtctaaatataaaggcaaatatgaagatgtaggaacgagtctgacaggcgtcaagatgggtctggtcgttcctcagtacatgaaaaacgtcaattcaattgaagatttgaagaaataacgaagaaaagcagccctgtaacgggctgcttttcttatgcttcaaacgatttgaggacggcggccgttaatatctcaacgcctgtaaagatggcgcttcggtcaaatgtcatttggggatggtgaagccccggctgcagaccgcatcctaggccgagcatcgtcgtttttaagttcggcacctttaacccgtaaaagtgaaaatcctctcctccggttgtcacaagaggttcatccacatgttcttctccgagaatgccgcttatcgcagatgccatgatggcttccgcctctttgtttcgctcggctgccgggaggctgtgttctttttgcagttcgatttttgcgccgaatgcggcagccgccgcctcacaggctctttcggtttcggcggttaatttctccatggcggcattggtttgtgcgcggagatcaaggctgaacgatgcttttcccggaatgatattggaactctcaccgcctgcctgaagctttgtcatcttcacggaatgcgggatgccgggatcaagatgaatgaagctgagtttttggacgagaagggcggcgatttcgatactgttaaggccgagatgcggtctcgcgccgtgggcttcttctccgataatcaggccttctatatgctggcttgagccatgcagaatggacggtgcgcatcggccgtttgccgtttcctgtacggggcgcacgtgcacgccgtataagaaatcaacatcatccagtacgcctttttcaatcattttcagcgctccgccgcctttttcttccgccggctgaaaaattaagcggatggtgcccttcggaagtttcggctgactctttaaaagcatcatcgtgccgagcgccatcgtcatatgtgaatcatgtccgcatgaatggttcgcctgaaagacaccgtccacttcctgccacagcgcgtcaatatccgcccggacagccacaacgggcgagccttctccgatttcgccgacaacaccggtacaatcatcaaacgtgcgggtccggcagccggcctctttcagtttttcagtcagatattcagttgtttgatattctttccagcttacttcgggattggcgtgcaggtggtcaaaaatatccataatgacttgcttttcatgcgctgtgagtctgttcatgccgtaagtcctccttcaaaagctgtctgttttttatttttgatattgaaaacaggcaatcggtctgtatataatatagcacatatctgtattttctgaatagtttataaatttaaagcgggatggtgatgttatggctgtgccgaaggccgaacttgtattgaaaaagaagaaattgtttgtaatgcctgatgcttatgtgctgctgttcattgtcgctttactatgcgcgatagcgtcgtacatcgttcccgcaggagaatttgacagggtgacaaagggcagtgtgacgtccgccgtcccggggagttatcattctttagaccggtctcctgtcagcccgatcgctttttttaccgcgattcaggaagggatgacaagttccgcgccgattatttttttaatcctgtttacgggcggcaccattgcgattttggagaaaacgggcgccatcaatggattgatcagtaatgtcatcagtacgttccgcacaaaacagctgctgtttattgcgattgtcggatctctattttcgatcctcggcacaaccggcatcgtcgttaattccgtgatcggttttattccgatcggcctgatcgtcgcccgctcgctgaaatgggacgccgtggccggagcggccgtcatttatatcggctgctatgccgggtttaacgcgacgattttatcaccttcaccgctcgggttatcacaaagcatcgcggagctgccgctgttttccggtatcggcctgcggattgccgtctacatttgttttctgttatcatctattttatatatttatcggtatacgagaaaactcagaatagcaaaggacgccagtctgctggggaacgattggtttccggcggcaggttcattcccgcaggtttctgagccggaggacaagcatgtcccgtttaccgtccgccataaattgattctggctgttgcggctttgtcgcttgccggctttttatacggcgcgcttactcttggctggtctgattcagagatggccgccgtgttcatttttatctcaatcgtgtccggcctgattgcgggaatggcggcaaatgatatcgcaaaaacgtttattacaggctgtcaggggctcgtttacggtgcgctgatcgtcggaatggcgagaagcatttccgttatcctggaacatggaaagctgcttgatacggtagtcaatggacttgcgtcactgctgcacggtttcagcccgatggcaggcgccatcggaatgtatatttccagcgccctgcttcattttctgatttcatcgggctcaggggaggcggtcgtatttattccgatcttggcgccgcttgccgatctgatgggcatcacgagacaggtcgcggttgaagcggtcatgctcggagaaggcgtcgtaaactgtgtcaatccgacttccggcgtgctgatggccgtactggctgccagcggcattccgtacgtaaagtggcttcgcttcatgattccgcttgcgctgatttggtttgtcatcggtctcgtgtttatctgcataggcgtcctgatcaattggggcccttattaacatttttgtcaatgatatttcggtttatcattatgaatcggcaagatataatgggagttgtaagccattcttaatagtacgggaggaagtcatgaatcagcgtcggaacagactttcaaacgtgaatggaaagagtgagagtgtgaaagagaaagaacgaatgatttggtcagaagtcggaatgcttgtgggcacactgtctttgcttgacatcatcgtacgcggacttgttctgaactgtccgtttagggaatgggccggaagcttggcggttttcttcattataattgtttattattgcatcagggcgggggcgtcgggaatgctcatgccgagaatagacaccaaagaagaactgcaaaagcgggtgaagcagcagcggatagattcaattgcggtcacttttgcggtagcggcgattacgatgtacgacagggggtttccccatacattctttgcttggctgaaaatgatctttctttttatcgtctgcggaggcattctgtttctgcttcggtatgtcattgtgaagctgtcttacagaagagcgataaaagaaataaaaaagaaatcatcttgacaggtggtttctttttttgtttgaaagcgggaagtctttttaattgataggaatatagatttgaattcactctgccacgttgctttgatagagagtgtgtgataagttgaaatgtaagcgttaacagaattctccagtcttcacaacagttgaaaggagctgaagaaagagtaagaggaatttttgactccgcagtcagtcttcaaaaatcaaataaggagtgtcaaaaatgtttgaaaaacgattcaaaacctctttactgccgttattcgccggatttttattgctgtttcatttggttttgtcaggcccggcggctgcaaacgctgaaacttcaaacaaatcgaataaggtgaccgcgtcatcggtcaaaaacgggaccatccttcatgcatggaattggtcgttcaatacgttaacacaaaatatgaaagatattcgtgatgcgggctatgcagccattcagacgtcgccgattaaccaagtaaaggaagggaaccaaggagataaaagcatgaggaactggtactggctgtatcagccgacatcgtaccaagtcggcaaccgttacttaggcactgaacaagaatttaaggacatgtgtgcagccgcggaaaagtatggcgtaaaagtcattgtcgatgcggttatcaaccataccaccagcgattatggcgcgatttctgacgagattaagcgtattccaaactggacccatggaaacacacaaattaaaaattggtcggatcgatgggacgtcactcaaaattcattgcttgggctgtatgattggaatacacagaatactgaggtgcaggcctatctgaaacgtttcttggaaagagcattgaatgacggagcagacgggttccgctatgatgccgccaagcatatagagcttccggatgatgggaattacggcagccgattttggccgaatatcacaaatacatcggcggagttccaatacggagaaatcctgcaagacagcgcgtccagagatactgcttatgcgaattatatgaatgtgacggcttctaactatgggcattccatcagatccgctttaaagaaccgtaatctgagtgtgtcgaatatctcccgttatgcatctgacgtgtctgcggacaagttagtcacatgggtggaatcacatgatacgtatgccaatgatgatgaagagtccacatggatgagtgatgacgatattcgtttaggctgggcagtgattggttcccgctcaggaagcacgcctcttttcttttccagacctgagggcggaggaaatggtgtaagatttcccggaaaaagtcaaataggagatcgcgggagcgccttatttaaagatcaggcgatcactgcggtcaatacatttcacaatgtaatggccgggcagcctgaggaactctcgaatccgaatgggaacaaccaaatctttatgaatcagcgcggctcaaaaggcgttgtgctggcaaatgcaggatcgtcttctgtcaccatcaatacttcagcgaaattacctgacggcaggtatgataatagggccggcgccggttcatttcaagtagcgaacggcaaactgacaggtacgatcaatgccagatcggcggctgttctttatcctgatgatattggaaatgcgcctcatgtctttcttgagaattaccaaacgggggcagtccattctttcaatgatcagctgacggtcaccctgcgtgcaaatgcgaaaacaacaaaagccgtttaccaaatcaataatgggcagcagacagcatttaaggatggagaccgactaacgatcgggaaaggagatccaatcggcacgacttacaacatcaaattaaccggaacgaacggcgagggtgcagcgagaacccaagaatacacatttgtcaaaaaagacccgtcccaaaccaacatcattggctatcaaaatccggaccattggggccaggtaaatgcttatatctataaacatgatggaggcagggccatagaattaaccggatcgtggccggggaaagccatgactaagaatgcagatggaatgtacacgctgacgctgcctgcgaatgcggatacggccaacgccaaagtgatttttaacaatggcagcgcccaagtgcccggacagaaccagcccggctttgattatgtgcagagtggtttgtataacaactccggtttaaacggttatcttccgcattaatggatagggccatcatcacatcagcgtgccggcaaacccccgcttctgggaaagggacagcgcgtcttcaatcacgctgaaaagatgacaacatcctaaaacggttccgttttaggatgttgtcaacaatccggaaaccatcaccgatatttttttgttcaaaaatcaaacttttctcttgcaaaagtttgtgaagtattgcacaatataaatgtgaaatacttcacaatttaaaacagacaccacgaaacactggaggatgagcatacatgatgaacgaacgagtgaacaaagtagcattaatcggagcaggttttgttggaagcagttatgcatttgcgttaattaaccaagggatcacagatgagcttgtgatcattgatgtaaatagagaaaaagccctgggagatgtcatggatttaaatcacggaaaggcatttgcgcctcacccggtcaaaacgtcttacggcacatatgaggattgcaaggatgccgatatcgtgtgcatctgtgcaggggccaatcaaaaaccgggcgaaacgagacttgagctggtcgaaaaaaatctcgccatttttaaaagcattgtcggtgaagtaatggcaagcggatttgacggcatcttcctcgttgccacaaacccggtcgacattctcacttatgcgacatggacattcagcgggctgccgaaagaacgcgtcatcggaagcggcacgacactggattctgcgagattccgttatatgctgagtgaatacttcggcgccgctccgcaaaacgtacacgcccacattatcggcgagcacggcgataccgagcttcctgtatggagtcacgccaatatcggcggagtgccggtgcagcaattgcttgagaaaaatgcagcttacaagcaggacgagctggatcagatcgttgatgatgtgaaaaacgcggcctaccatattatcgagaaaaaaggcgcgacatattacggagtggcgatgagcctcgcccgtatcacaaaagcgattttgcgtaatgaaaacagcattttaaccgtcagcacatatctggacggccaatacggtgtaaacgacgtctttatcggcgttccggccgtcgtcaatcggaacggcatcgcaggtgtgacggaacttgagctgaatgaaacggaacaggctcaattcagccgcagcgcaaacgtgctgaaagatattctcgctccgcatttcgcagagtaaacaaaaaagcagtacatgacaaacgccatgtactgctttttttaattcgcttttttcgccatttcctgagaggtttttactctcgcttttcccataaacaaaatggtaacggccgcaatgacgatcggcgccagcgcaagcgtaaatacatatgtgatgctttgcgacatggcgtcaataatgcgatccagaatgtgcggcggaatatgagcgcgcgtgccggcctggaaaatctcctgcggatttccgatgttctgcatcgcgccgcccgctcctttcatgccgctgaatgaatctgtgagcttattggtaaacacattcgtctggatggttccgaaaatcgtcacaccgagcgtcataccgaatgatctcaaaaacgagtttgttgagttggcgcttccgcggtaacgcggctccagatcgttcatggacgcagccggcagcagcgagaagttgaagccgacgccgaatccggagatcagcatgaataccgtcagcatcgtacgcgccgtatccggtgtcatattggaaagcagcagcattccgataaagaaagcgaccacggaaatcagcattaaattgcgaaaccgcactttcgtctggaaaattccgccgatcatacttccgataacagaaccgatcatcatcggcgtcaaaataaagcccgcgcttgtcgcggtgcttccgtacacagcctgaacgaagatcgggataaacaccgctaaaatgacgaacgtcgcgccgtaaaggaacgccagaatctgtgccgtagcaaataaacggtttttaaacatccaaaatgagataatcggttcttccgcttttctttccacaataaaaaaggcgataaagaacacggcgaacacagcgaacagaccgatgatctgcacggagttccaatcatacgtttttccgccgagctcaagagcgaacatcagaccgacaatggaaaccaccagcgtgattgcgccggcccagtcgattttctgtttcttgtgttcaagggattctttataataacgaagaatgaaaaacaatgataaaataccgatcggcacgttgatgtaaaacacccagtgccagctgatggagtcggtaatgagcgcgcctaaaagcggcccgagaacgctggacaggccgaaaacggcaccgaacatgcccgacatttttccgcgtttttcgggcggaaataaatcaaaaatgatcgtgaaggcgatcggcatcagcgcgcctccgccgattccctgaatgacgcggtaaataatgagctgatccattgtttgggcgattccgcataatgcagatccgattaagaaaagaataagaccgaataaaaagaaacgcttgcgtccgtacatatcggacagttttccgtaaatcggcataccggccataacggctaccatgtatgatgccgtcacccacgcgaacttgtcgaaacttccgaggtccgccacgatatttcccatcgcagtggcaacgattgtattatccatagccgacattaaaatgcccagtaaaagaccgatgacgacaaacttcgtcgaggcgtccttagcggctgtttgttccatgctttttcctcccatacttacttttgatcattaaatttgctatgatcatattagatttgccgaaaattatcttgatcgtcaagataaattgattttatagggaggcctgtcagttgtcaacaagaaataccagaagcgagacggaggaaaccgcgatacagttattccggaagatggccacaaggacgatcctttttcatcaggcggccgctcaatctctcggtctgtttccgaccgatttaaaatcagctgatatcttaaatgaagcaggcccgatgaccgcaggcgagcttgggaaaaaaaccggcctcagcacaggttcggtaacggcgctcattgaccggctcgaaaaagcgggatatgtcatgaggaaaaaagaccccgaagacaaacgtcgggtgatcatcgtgcccctgacggccggaaaagcgaatgtgaagaaattgttcagctccttatcccagtccacgatcagcctttgccgacaatataaagaagaagaactgcagctgatattcgattttttaggaaaggcgacggacatgatggaagacgagcttgagaaattaaaataatgtatcatatcacggcccattcatgaataacttgtacaagttgcatgaatgagggggaagccaatgaacatctttttaagctacatcgttctcgggctgtcattgtcagcacctgtcggaccggtcaatgcggcgcaaattgacaaaggcatcaaaaacggcttttggcatgcatggattttcggtcttggcgccatggccgcggacgggctgtatatgattctgatctatttcgggctgtctcaatttttgaccgctccttttgtaaaaacgtttttgtggctcttcggttttttcgtgctgacctatacgggagtcgaaacgttaaaaaatatcagggaagccatgaatgtcagaagcggaaaaggaaaaccggctttttacaaaacattcggcgcgggattttttatttctctttccaatccgctgagcattttattctggctcggcatatacggcagcatcctcgctaaaaccgctgaatccttcgatgcaaatcagcttttgatttacagctccggcattcttctcggcattttgatctgggatttctgcatggcgatcgccgcgagcactttcagaaatctccttcatgaaacagcgcttcgctggctgacgggagcggcgggtgtgtctttgatcgttttcggattttatttcggctggcaggggattcaaatgctcatctcataaatagaaggactgtcacccatcgcctgtctccatcataacgtatcatgacgatactggaggtgggccgatggcaagcgagctgtacacaaaaagttgccttgaggaaaagttattggatctgccaaattggcagagagtcgcttttgagcttctatcagaaaaagtaggcgataaagcggacgcgtttccgtgcattccgggacgtcagggatttttgacagatcagctccggatatcttttgcgggtgatccccgcgaggagggaaccccggaggaagtggggatgctgctgtccgagtacggaaagatctcaaggaataccggaaaatacgcgtcgctgcttgtgatttttgatacgcctgaggatttagctgagcattattccgttgaggcgtatgaagagctgttctggtcttttttaaaccggctgagcggctgcgacccgaaagactggccggaagacataccggaagaccctgaacattataaatgggagttctgctttgacggcgagccgtattttattctgtgcgcgacgcctgcgcatgaagcgagacaaagcagaagcttcccgttttttatgctggcgtttcagccgagatgggttttcgaaggattaaatgattcaaccgcgttcggacgaaacatgagccggctgatcagaaaacgcttagaggcgtatgatgaagcccctcttcatccccgattggggtggtacggaggaaaagacaatttagaatggaagcaatatttcctccgtgatgatgagacgcaagtgtcaaagtgtcccttttcttatttgaagagactgtttaaaccgacgaaataagctatgatccggcagggctgtgtccctgctttttttgtacgatccatgtcacgatcgcaatgacggcgagaaaacaaaggctgaccagaaaaccgggccggctcgatttctcaaacagcgtcccggagacggccgcgacaatcagcacaagggcgataacaatctgtgcggttcccatctttgtcgtttcgagcagtttcttgcccgagaacaaaatgaacagccacgtataaagtagcatgaggcccgccgcggttgtcatgtgttcatatatgtttttcggcagcaccagtgacaggatgatggagacgatgagtccggcaaacgtcaatccgagcgcaggccagcagatttttttgttttcctttaacctgaagcatctcggcgcatctccgtcatcggccattgtacaaagcaatgtcgtcacggcaaacagcgaggcgacgagcgtggaaaatcccgcaataataaaaattccgttaaaaatatcaagaatgatatctaaatgaaaccccttcagcgatgtaataaacgggctgtcctgttcggtgaatttgcccagcggcactaacagcagtgccaggccgagagaaatgacgtaaattaccgcaagtacggcaagcatcagccggcctgattttgaggcttcctccggctttttcaaatgcacggtcatcagccccaagacttcaattcctccgaaggcgtaaaacgcataaatcagtcccgtccataaccccatcgctccgtgcgggaacaaatcctttgattcgttcggcacctgcacatccggtttatgagaaaatataccgcacagcgccaatatggcgatgacgataaacataacaatcgccgccgtcttgacaacagcgagcacattttccgttttttgaaaaacggacagccccgtaaatataatcaagagaccgagcaccgcatagatggaggcgaaaatccacagcggcacattcggaaaccaatgcttcgtaaatagcgagatcgctgtcagctggcttccagtgatcagcatctcggacgaccagtacacccatccgttgctgaaaccggcccaagtgccgaaagcctttctcgcataagcgcaaaaagaccccttttcgggctgtttggccgagagcttcgcgagctgctcaaagacaaaataggtgccaagcccggcaataagaaatgagatcagcgcggaatatccgcttttgacaatagcgatgctggacccgagaaaaaagcccgtcccgattgtgcagccgacgccgattaaggagagctgccaccaagcgagatttcctttaggctggtcctgtgatttacccatgaagttcaacccctttatcaaagcttagattgcggccgtcagaaggggaatatacatccaataaattgctttacatgaaacaaacggccggggttcataatagaagaaaaaaaggagcagtctgatgacacagcaatttatcgtaccgccgaaaaaagggctcggcctgaaggttcacaaagggcagattataaaagtagtcgatgtggaagggcagcaggtggctgattttacggcgtatcatgccaaggacttttatgaacatcttgatcagggcgcgacgattgatgccaaccagtccattcatgtaaaaacgggtgatcatatttattcgaatttatacaagccgatgctgacgctgattgaggatacagtcggcaagcatgacctgctgcttcccgcctgccgtccggatatgaacaggcttttatacggaaagcataaagacgagctccaggatacgtgctatgacaatatgagcggggcgcttgaaccgttcggggtgccgcggccgcatatgcattacccatttgccatctttatgaacacggtgctcgatgagaaggggaacttatcagtcgaaacgcctctttctgacgcgggtgattatgtacggctccgtgcggaaatggatctcgtcgtcgcgttttcatcctgtccgattgaaaaaggaaaatgcaacggagacagcatcacggcgctgcgggtggaaatcagctgatcccggtgtatttgattcacttaaaatctgcacctgtgctatatttaacagagagtcgtacatagtggcatgattcattttcagcatgaacgggaaatggatcataaagaaacaatgcaggaggagtgattgggatgagcatccagaaacaaattatgaatgatctccatgtaaagccctcaattgatccgaaacaagaaattgaggacagagtgaactttctgaaacaatatttgaaaaaaacaggtgccaaaggctttgtgctcggcatcagcggggggcaggattccacgcttgcgggacgcctcgcccagttggcggctgaaagcatcagagaagaaggcggaaacgctgaatttatcgccgtccgccttccgcacggcacacagcaagatgaggatgacgcccaattggcgctcaaattcattaaacctgataaatcatggacatttgatattaagtccgctgtcagcgcgttcgctgatcagtataaaaaagacacgggcgatcagctgtctgactttaacaaaggaaatgtaaaagccagaatgagaatgatcgctcaatatgccatcggcggacaagaggggctgcttgtcatcggaaccgaccatgcggccgaggcggtgaccggtttcttcacgaaatacggtgacggcggagctgatctgctgccgctgaccggattaacgaaacgccagggcagacgtttattagaagagctcggcgcgccggaacgcctgtatttgaaattaccgacggccgatctgcttgatgaaaaaccgcagcagactgatgagaccgaactcggcatcacatacaatgacattgatgattatttagaaggcaaggatgtttcttccgaagtgattgaagcgctggaaaaacgctacctcagtacggagcataagcgccaggtgccggcatcgatgtttgatgattggtggaaatagaatgaaaaaaacctcccttttggggactgacccccgtttttgagacagggatcaaaacacctttaagcagccagctgtcggtatgtgaccggcggctggttgtttagtttcgtttgaatacgaatgttgttataatagtatatataggtttcgacagtttgctctacgatggtcgtcgtagtgctttccaacctgtcgaggtagaacgtttcagactttagtgaggaatgaaacgattcgatggaggcattatcagcgggtgtccctttgcgggacatgctcatggtaatgccttttgttttaacagctttctgatactcataagatgtataaacagaaccttggtcactatgtaacacgcagttctctggcagtacgggcagctgatcaagtgtgtgtaagacaaaatctgtgtcctgtctatcgccaatcgtaaaagcaatcacttctccattgtataaatccaatatactggaaagatacaattgtttctgcccataaggcaaatatgtgatatccgttactagcttttccagagggcgatcagactgaaagttccgatctaatatattctcggccacggcatatggctgcccattcttcttgcgctttttcaccttaacccggcattgccactgatttttcttcataatgcgctgaaccgttttatgattaatacgcattcccttttttaatatggctgtgattttccgatagccatatcgatacttgtgttctcggcacaacgtgccgatttgtttttctaaatggtatttagggttatctttcatcagattcttcttccaacgataataagatgctcgtgagatacctaaatgaatacagatatcctgtatggtcattgtgccgcgcaatgcttctacaagctcgactggcgtttcgctatcagcttcctttccaattcgttgtacttttttaacacttcattctgttgtctcagataacgattttctgcctgcagtttctctaattcggaagaatactctggaccttttccataagaatattgctttccgacaggttgttcgaatcgatgtgtgtccccagctttataccacctgacccatgtctgcacctgcgtcttattctttatattcaattcctgcatgatctccttcacaggcacgcccgccaatctcatttctacagccttctgtttgacttcaaccggataactcactcttgccctcatagaaaaacacctccaagtctaatttcggataacaacgatccgttttcaaacttgaaggtgttttttgtttgtctcatattatggggtcagtcccatgtttttcaaaacgtttttttatttgatacggatatgattcagcttcaccatcaatctgtcggtgaatcttcgaaggctgcctctcgaatcaggcttaagaggcagatttgcttgggcagcgatcgtttctgcgacctgctgaatagacatttggtctgtatggagatgttctgtgaagaggctatcagacaggctgttgatgcagcggtcgatttgttttgcggcccaggagttttttccttccgctctggtgcgcaggcgtttcagcaatgtttcctttgaagccagcagggtaaagtggtgaatggtccggccatcctgtctcagcctgctgataatgtcatggaagtattgaacgttcgtaatggtcatgggcacaatgatgatgccctgatatgtatctgacaaataggaaagcatgctgtaattgaattcccgccacagagggtagctttgaaagtcatcttcagcgatatccggcggtatcatcgaacgcatcgcaaaccccatcttttcaggatcatatatgtaagacggtttcagtcttctgtgcagttcaaacgctgtttgtgtttttccggaaccgaaagccccatttatccaaatgatcatcatgatatccccctttttttatatgatacaaaaaaagacccttcgatcgaagagtcagcgggaaaaaacagacgtatattcgcggagcgattcctttatatgcgtaaaggcatgttctccaaaatactcaagagaaacaaaaccgtcatattgtctgttcatcagctcttttaaaaatgctttttgatcgagatctccttgaaaaatcggagttggcttgctgagataccagttggcaaaatcccagtgatagtttttcagatgaatgtggctgacggtatgatacagtttttccaaagcggacatttggtcaacgtgattgacgtgtaggttggagccgtcaaaaatggtgcggacccgcggatgtccgacatcctccaaaaatgccagcgccgcctccggtgtatccgcgtacgtatcgtaatgaatctcaagcccgatatcgacttcatagtcatctgcgagccgtgccgcctgctgaaattgatcaaccgcacgttgccacttttccggtgacgtccggtgcgaaggaagattgccggcaaagactctgatcaagggactgtgcagctgtcgtgccgcgcttaatgccctttgaacatcctttaacgcctgcctttcatcctgagtggcgaagtcagtgtacaaactgacggcaggcaccccgatgccttcctcctgaagctgttgataaagcctgtcgagcgggccgatttcctctatatattggtttgcgtgtccgtaccacagttcgattccgtcaaaggagtgctccttcgcgaaagaaatgatgtcgaaaatatgcttttttttaaatcctgtcgtgcaaaaactcagtttcatcgataatcctcccgtaactgtctatcatatgtgtactttttccccgggtgcgatacggataaacagatgaaaagggcagacacttttatgagcggggtgtgtctgcatcaggtcagtgcggcacacaaattgtttagcgcttttttgcgtcaaagtattaaataattgaccgaagtgttgtacaattaatttcattcgagtaaggggggagaagccattgaaaaatgaaacagagctgacggacttcagtcccgtccgcaataaaccgactcgcgctcgttatgtgatattggttcttttgttttttatcactgcgattaattatatagaccgagccagtgtatctattgtcggcccatccattcaacattcgctgaacataagccccgcgcttttgggcatcgttttttctgcgttcagctggacctatacggggatgcagattcccggcggactcattttggataaattcgggtcgaaacggacatacggaatttctttatttgtatggtcggtttttaccggagtacaagcttttgcgacaagtttcgggtttctattcggctgccgcctgctcatcggcatagctgaatcgccggcgtttccggcaaacaaccggattgtcacgacatggtttccaaggcgggaacgcgcctttgcgacgggtgtttatacggcgggggaatatgtcgggctggcgtttgccacaccggttttattctgggtgttaacggcaattgactggcgcgccgtatttatttcctcaggggtgctcggaattgttttctccattttctggtttaaaatgtatcacgagccgaacgggtatcggaaagtgaatcgtgaggagcttgattatattaaagaaggcggcggactgactgaggtgtctgattcagccggcaggatatcgtgggcggatttcgtccagcttctaaaataccgcaagcttgtcggcttgtatatcggccaattcgccgtagcctccacgctgttcttctttttgacatggtttccgacttatctggcggaggcaaagcacatggctttcttaaaagtcggcttcgccgcatcaatcccgtatatcgccgcttttttcggcgtattgttcggcggattttggtctgacggcatgatgaaacggggggtgtcggtgaacgttgcccggaaaacgcccgtcatcctcggtcttctgctgacaggctccatcgtgctcgcgaatgttacggattctgctcctgcggttttgacgatcttatccattgcttcttttgcgcagggcatgtccaatatatcctggacgatgctgagtgaggtcgcgccaagcgaaacaatcggattggcagggggcgtctttagctttttcgccaatatggccggcattatcaccccgcttctcatcgggtttatcgtttctgcgaccggttcatataacggagcgattctgtttgtcggcgctgtcgcatttatcggggcattttcttatattttcattgtcggaaaggtggaacgcattacgctccgatagaaagaaaaactcatctcttcttataaaggatgggttttctttcattgcattatctctatatttcaatattgagttatcatataataaacataactttttcatttcttaggaggatttcgccgaagatgaacgcaaaacgtgccattcccgtaagagaaagaaatatcgtactgatcggattcatgggtgtcggaaagacaacaatcggccagctggtcgctaagaaactatacagagacttcattgatattgatctgcagattgagaaagatttcaatatgtccatccctgaaatgtttgagaaaaaaggtgaagcctttttccgtcagactgaaaaggactatatattagatatctgccgcaatacgaaattcaagatcgtgtcgcttgggggcggttcgtttaaacaagaggaaatcagacagtgctgccttgaaaactgcctcgtgctccatcttgatttatcatgggagaattggaagcagcgggctgacctgctgattgaaagccgtcccgttctgcataaccgttccatggatgaaatgcagcagctctttaacgagcgccaaagcatctatgataaacataattcaaaagtggcgacggataatctggaaccagaagaaatcgccgattatatcgtagaaacgttaaaaatcggctgggacctgtatcagccgatgtaaaaagagccgtgacgctgtgagggaactgaccccataatatgagacaaacaaaaaacaccttcaagtttgaaaacggaccgttgttatccgaaataaaacttggaggtgtttttctatggggacaagagtgagttatccggttgaagtcaaacagaaggctgtaggaatgagattggcgggcgtgcctatgaaagagatcatgcaggaattgaatatcaaaaataagactcaggttcagacatgggttagatggcataaggctggggatacccaccgattcgaacagcctgttggaaagcaatatacttatggaaagggtccggagtattcttctgaattagagaaactccaggcagagaatcgttatctgagacaacagaatgaagtgttaaaaaagtacaacgaattggaaaggaagctgatagggaaacgacaatcaaactggtagaagaattgcgcaagacgatgacggtacaggacatctgtgtccatttagatatttcacgcacttcatattatagatggagaaagaatctgactaagagtaatcctaagatgcgactggagaaacaaatcggcacgttgtgccgagaacacaagtatcgatatggatatcgaaaaatcacagccatactaaaaaagagaataagtattaatcataaatctgttcaacgtattatgcagaaaaatcaatggcagtgtcgggttaagatgaaaaagcgtaaaaaaagtgggcagccatattctgtggtcgataatatattggatcggaactttcagtctgatcgccctcttgaaaaactggtaacggacatcacatatttgccttatggacagaaacaattgtacctttccagtatattggatttatacaatggagaagtgattgcttttacgattggagataagcaggacacagactttgtcttagacacacttgatcagctgccaacacttcctgaaaactgcgtgttacatagtgaccaaggttctgtttatacatcttatgagtatcagaaagctgttaaaacaaaaggcattaccatgagcatgtcccgcaaagggacgcccgctgataatgcctccatcgaatcgtttcattcctcactaaagtctgaaacgttctatcttaacagcattgatcgaactacgaccgccatagaatacattcattattataacaatattcgtattcaaacgaaactaaacagccaatcgccgatacaatatcggcaattggctgtatgaaggtgttttgatccctgtctcaaaaacgggggtcagtcccgagcgcacggcttttttgtttttaaacaaacgtttattaaaatgtttagaaaatgagtgtaaaatcgtgttaagatagagtcagaaaattaaaacatataaaacaaaggagaataatcggatatgcaattatacgacttgccgctcgaccaactgcaaacctataaaccaaataaaaccgctcctcatgacttttcggatttttgggcatcatcattacatgagcttgcaaaggaagaggcaaagcctgaattaaaggctgaaagctacccggctgacggcgtgaaagtattccggctgacataccgaagcttcggcaaggcggaaattgagggatggtacgccgttcccgaccggcaaggaccgcatccggccatcgtgaaatatcacggctataatgcgagctatgacggggatatacatgacatcgtaaattgggcgctacacggatatgccgcattcggcatgcttgtccgcggtcagcacagcagcacagatacaagcgtctcaccgcacggacacgttcccggctggatgacgaaagggattttagataaagatacatattattaccgcggcgtgtacttagacgccgtccgggctttggaagtcatcagcggctttgatgaagtggatgaaacgaggatcgccgtcatcggcgggagccagggaggcggactttcaatcgccgcggcggcactatctgacattccgagagcggttgcggccgattatccttatttaagcaattttgagcgggccattgatgtcgctcttgatgagccgtatcttgagattaactcctttttcagaaagaacggcagccctgaaacggagaaggccgcgatgaatacactggcctattttgatatcatgaatctggcggaccgcgtaaaagttccggtgctcatgtccatcggcctgattgaccgcgtgactccgccgtcgacggtgtttgccgcttacaatcatctggaaacggaaaaagaattgaaggtttaccggtatttcggacatgaatacataccttctttccatacggaaaagctggcctttctgaaagcgcacctgaaaggctgacagccgcgaaaagcccaagtacttgggcttttttcaggaatcatcacggaaaaggacggatacagatggaacaaaagatcatcgaaggattaaaacgaattgaagcacagcatggcgtcaaggtgctttacgccgtagaatcagggagccgcgcatgggggtttccgtcaagagacagcgactacgatgtacggtttctctatgtgccgaaaaaagaatggtacttttcgatcgaaccgcatagggatgtcatagaagagccgattcatgacatgcttgacatcagcggctgggaactgagaaaagcgcttaggctttttaaaaaatcaaatccgcctcttttggaatggctctcttctgagatgatctattatgaagctttctcagcggctgaaaagcttcgaaaactgaaaatccgcgccttttcgcctgaagccggcatctatcattatctcaatatggcaaaacggaatgaaaaaacggaattgcggggcagtgaagtgaagattaaaaagtatttttatgttctgcgtcctctccttgcctgcagatggatcgaaacgttcggctccgtaccgccgatgtcatttcccgtactggccgatgccttattgacggatgaagcgctcatttctgaaatcaatacactgcttacaaggaaaaaaagcggtcaggagctggctccggaaccgagaaatacgattattcatgcgtttatagaagaagaaatagaacgcatcgggcactatgtcaaaacgatcaaaacgccgaaacctgacataacggaggaactgaatcagctattgattcagaccgtcgaagaggcgtgggaggaaaaaggcggaaattgacgattgccgtcattttcgtccgccttttttcggcataatccgcctgctatctaagaagctgattgtggtaaaaccacaaaaatatatcagaatctttgtatttttagaatattgtgagaggatgttttgtccatttacaatagactcatacaaatacttcttagattgcggggtgttaaggttggaagtgattacaagagattttttcttatttttatccaagagcagttttctcaataagatggcgcgaagctggggaagccgtgtggcagccggcaaaatcatcggaggaatggatttccgcagttctatcccgacaatccgacatttgaacagccaggggctgtcagttactgtcgatcatttgggggaatttgtcaacagcggtgatgtcgcgaaagaacgcaccgaggagtgcatgcagaccatcgccttaatcgctgatgaacagctgaattcccaagtgtcattaaaaatgacgtctttaggtcttgatatagatctcgatctcgtctatgaaaatatgacgaaaatcctccagacggctgaaaaacataaagtcatggtgacgattgacatggaagatgaaacgagatgccagaaaacgctggatatctttaaagacttccggagccggtatgaatatgtaagcaccgtggtgcaggcctatctgtacagaacggagaaggatcttgatgacctcagcccgctgaatccgtttctgcggcttgtcaaaggggcctataaagaatcggaaaaggtggcctatcctgaaaaaagcgacgtcgatgaaaattataaaagactcatccgcaaacagcttttaaaaggacattatacggcagttgccacgcatgatgacaaaatgatcgagtttacaaaacagcttgccaaagagcacggcattccaaacgaccgttttgagtttcagatgctgtacggcatgcgctcgcaaacccagctcagcctggtggaagaaggataccgcatgagagtctacctgccttacggggatgactggtacggctatttcatgagacggctcgccgaacgcccctcaaacatcgcattcgcctttaaagggatgactaagaagtaaaaaagggagagatgacaatgactacaccttataaacacgaaccattcacgaatttccaagatcaatcgaacgttgaagaatttaagaaagcgcttgcgacggtaaatgagtatctgggaaaagattatccgctcgtcatcaacggtgaaaaggtagagacggaagcgaaaatcgtttcaatcaatccggctgataaagaagaagtcgtcggaaaagtgtcaaaggcgtcccaggagcacgctgagcaagcgattgaagcagctgcgaaagcgttcgaagagtggagatacacatcccctgaagaaagagcggccgttttgttccgcgcagctgccaaagtccgccgcagaaagcacgaattctccgccctgctcgtcaaggaagcgggaaaaccttggaacgaagctgatgcggatacggcggaagccatcgactttatggaatactacgcgcgccaaatggttgaattggcaaaaggcaagccggtcaacagccgcgaaggcgagaaaaaccaatatgtgtacactccgactggagtgacagttgttattccgccgtggaacttcttgtttgcgatcatggcaggaacaacagtggcgccgatcgttactggaaacacagtggttctaaaacctgcgagtgctacacctgttattgcagcaaaatttgttgaggtgcttgaagagtccggattgccaaaaggcgtagtcaactttgtgccgggaagcggagcagaagtaggcgattatcttgttgaccatccgaaaacaagccttatcacatttacaggatcacgtgaagtcggtacgagaattttcgaacgcgcggcaaaagtgcagccgggccagcagcatttaaaacgtgtcattgcagaaatgggcggtaaagatacggttgtcgttgacgaagatgcggacattgaattggcggctcaatccatctttacatcagcattcggcttcgcgggacaaaaatgttctgcaggttcacgtgcagttgtccatgaaaaagtgtatgatcaagtattagagcgtgtcattgaaattacggaatcaaaagtaactgctaaacctgacagtgcagatgtttatatggggcctgtcatcgaccaaggttcttacgacaagatcatgagctacattgaaatcggaaaagaagaaggccgtttagtaagcggcggcaccggggatgattcaaaaggctactttatcaagccgacgatcttcgctgaccttgatccgaaagcaagactcatgcaagaagaaattttcgggcctgtcgtggcgttttctaaagtgtcaaactttgatgaagctttagaagtggcaaacaatactgaatatggtttgacaggcgcggtcattacaaataaccgcaaacatattgaacgggcgaaacaggaattccatgtcggcaacttgtacttcaaccgcaattgtacgggagcgattgtcggctaccatccgttcggaggcttcaaaatgtccggcactgattcaaaagcgggcggcccggattatttggccctccacatgcaggcgaaaacaatcagtgaaacgttttaagagggactgaatgggcatcctcctcgcggggggtgtccatttcaccataaacatataaagcggaggaggaaatgccatagcaaacattcagttgattatttccatttgtatttatatggcgggtatgctgtttatcggttatttcgcctacagacggacgtcaaatctgacggattacatgctcggggggcgttctttaggccctgccgtcacagcgctcagcgcgggagcggcggatatgagcggatggctcttgatggggcttccgggcgctatgttctcgacaggattaagcggcgcttggattgtgatcgggcttgtgctcggggcgtgggcgaactggcttttcgtggcgccgagactgagaacgtataccgaaaaagcggggaattccatcaccattccgggtttccttgaaaaccgtttcggtgatcatacgaagcttctcagactgttttcgggtcttgtcatactcgtctttttcacattttacgtttcatccggcatggtctcaggaggtgtcttattcaacagcattttagggttgaattaccacacgggactgtgggtcgtgacaggcgtcgttgtcgcctacaccttgttcgggggctttttggcggtaagctggacggactttgttcaagggatcattatgtttgcggcgcttattcttgtgccgattgtgacgattttccatacgggcggcccgggagaaaccgttgccgatatccgttccgtcaacccggaactgtttaacatgttcaaagggacgaccgtccttggcattatttctttatttgcgtgggggctcggctatttcgggcagccgcatattattgtgcgctttatggcaatcacatctgtgaaagaaatcaaacgcgccagacggatcggaatgggatggatgattttgtctgcactaggcgcgctgtttacgggtcttgcgggaatcgcgtattaccaccagcacggactgaagctggctgatccggaaaccatttttattcagctcggcaacattctgttccacccgattattacgggatttctcatttctgcgattttagcggccattatgagtacgatttcgtctcagctgctcgttacgtccagttctttagtggaggacttgtataagtccatgttcaggcgttcggcttctgataaggaactcgtatttctggggagaatggcagtgcttgcggtgtcaatcatcgctttggtgctcgcctgggagaaaaacaacacgatacttggtcttgtcagctatgcatgggcgggattcggcgcttcattcgggccggtcgtactgctcagtttattttggaaacggatgacgaaatggggggcactcgccggcatgattgcgggagcgattaccgtaatcatttgggcgaatgccggtctttcagactttttgtacgaaatcattccgggctttgctgtaagccttgccgctgtatttgtcgtcagcttattgacacaggctccgtcaaaagatgtcacagatcagtttcatgagtaccgtgatacactttctcaataaaagcaaggaacgagaggaagaagggaccgccctttttcctcttttcacgatacaggctttcggataattccgttttgggaatatgtgaatttttttctatacaaaaagtcaccccgcagagtatgataaagataaaaagagcataggagaaataggtatggaagagcttttagagagagttttttcatttacggacattgataaattaattgatttcatcagttatgaattgcagaagcccgttattctggaaagcgcggatttctttttgcttgcctataattcttattacattaatcacttcgactccgccaaccagcagacgatattttcaaaaaaatgccccgtgcagatttttgaaaggtttctgaaggacggggtgatcgaaaagctgaaaaccgttcctgaaccgttccgtgtcgaaaaaatagacagtatcggactgaatcagagagtggttgtaagcgcaaaacataaaggggaagtgatgggctacatctggattcaggagctcgaccgaaacttgacggacgaggagctcgattttttatatgaaacttcattccatgtcggaaaaatcatctataaaacgaaccggctgaaacaggaaaaagaagagagagcggaagacctggtgaaacgggcgatctttcagcaattctcctctgaaaaggagttcaggcgggaagcggaaaagatgaacgccgtgctgccgtcggttttttcggtagtcgtcctgcacgccgcaaatggggatggggaggcagtcgaagatgtgaaggaaaacatcaaatcgtacttgaatttgcgggataaagtcagtcacgtcttaaccattgattccaatattgtcatcgtcgtcgcaagcttctcgcaaaaaagctccggcacttcggcagcatctgaattcatccacaaactgctgactcattttcactttcagaagatccccactcccatctatatcggaatcggcaatgaatacagcagcatcctgaagctcggcaaaagttatatagaggcccttgaagtcataaaggccgccgaaattaccggaaaccaggaaaatatcccgtacgaatacagtaagctcgggatttaccgctatcttgaaagcatcgaagaaaaaaacgcctcactggaatatgtaaacgatgatttagcgttattaaaagccaaagacagagaaagcagtaccgaactgctgaaaacgttagaaatctatctcctcaataactgcaaaacaaaaccagccgcagaacagctttttattcatcaaaacacattgaactaccgtatcaaacagattcttgacatgacatcaattaatttaaacgacttcaggacaaggtgccagctgtatctcgatatcatgctgatgaaaaagagataaaaaagaaaccagtcgccgtactggtttcagttttaataccttcccgcttatcaatctcagaacctcacttctgaatcactcctttcccgcaagagagaaatgaataaacactgctgctcgatgtgtgttatacttttattgatattgattctcaattaaaaatgttgaagtatagatataaacgggaggcagaacgatggcggaaaatcatgaggtgtatgacgtcacgattataggcggaggcccgatcggcctgtttgcggctttttattgcgggatgcgcgagctgaaaacgaaagtgatcgagtttttgccgcggctcggagggaaagtgtctatgtttttccctgaaaaaatcatccgtgatatcggcggaatacccgggattgccggagaacagctgattaagcagctgaaggaacaggctgcgacatttgagccggatatcgtgttgaatcagcgggtgaccggatttaaacggctggaagacggaaccattgtgctggaaagttccgaaggggaaaagcactatacacgcacggtgattttggccgtcggcatgggaacgcttgaggtcaatgaacttgacagcgcggatgcgagccgttattcgggaaagaaccttcattataaagtggagaagcttgatgcgtttcaggggaagcatgtcgtgatttccggagggggagataccgcggttgactgggcgaatgagctggaaccgattgcggcgtctgttaccgtcttgcaccgcagggaggagttcggcggtttggaaagcagcgtggcgaaaatgaagcggtcttccgtgcgggtgcttgcgccgtatcgtctgaagcatctcaacggcaccggagaacggatcgagagcgtcaccgtttgccaaactgagtccggactttctgaagacatcaagcttgatgagctcattatcaaccacggatttaaaattgatctcggtccgatgaaggactgggggcttgagatagaagaaggcaggattaaagctgacagacatatgcggacgaatcttccgggcgtgtttgtcgccggtgacgccgcccattatgaaagtaagctcagattgattgcaggcggtttcacggaggggccgaccgccgtgaacagcgccaaagcctatttggacccgcaggcggatcagatggcgatgtattcgactcaccataaaaaattggtgacacaataaaaaagggctgacccccgatgttgagcctggggggtcagaaaagcattccggcgtatcagctgtgaacgagcatgtctttcatttcatttcgtataaacgcaaataactgttcctgatttttcacggcggtaaacccgcagccggcggggacgtcttcgcccatgcagatgacgggagggcagtttgctgacggattcggtgatatgccgatttgttttccggcgctgatcaaatgctgagcggattctttgcccatacagataatcatttgcagaggagactcactgatcgtgcgttcgatcatggaagtgaaccgctcatccgcgatatgttcatgggtgatataaaaagagcatgattttgagtctggcaagttttctgtcgcttgacggcttcccacaataagcgaatgcggagaatcatgttgacattcggataggagaaagccccgttttgtcagttccgtctttgcggcctcagtcgctgcattcaggcttgcggtcacccggcggatgtcgatctgcttgaaagccagtgtgtcaaagaattcgcataccgcaaggcgtgatgtaaaaaatagttgttcaaaggtgctgatctgtttcaggatgttttcgtttgcgggcatttttttaacgatccgcttcggccactcgataacatcggcgccatactcgcgcagcttgtctgtcaatgtatgttcttcatcgccatgagtgacaaccatgatatgccgcccgatgaacggtttgctttcaaaccagctgtgtgtttgaaaattgacaatatcaccgatgacgataatggcggggttggtgatgttttggctttgaactttttcatggatatcctgaagcgttcctttaacgctccgctgccgcccccacgtcccccattgaatgacgagtacgggaacggaaggggattttccgtactccgtaagcttacggcatataaatgacagatttttaacgcccatgtaaaacacaagcgtttgaacgcttcgggcaagcccttcccagtcgagattcggcctgccttgcaatgatgtatcatgagcggtgatcatcgcgaaggacgaagcgaaatcacgatgggtgacggggactcccgcatacagcggcgctgcgattcccgaggtgatgccgggcaccatttcatagcggatgctgtgctgatgaagcgcctctgcttcttcgccgactctgccgaacacacttgggtctccgcctttcaagcggactacggtgcagccctccgccgctttttcaatcagcagggcatttatctcagactgtttcataaaatggcggtcgggcagctttccgcaataaatgaaccggcagtccggtgaggcatattcaagaaactttgggtttgcgagccggtcatacaaaataatatccgctttctccagagcctgttttccttttacggtgatcagccccgggtctcctggtccggcaccgacaaaatatacgattccgtttttcatgatggcgtcatcccttcagcaatttaaaaaatgaaggaccacttgaaaaagtgatccggtctgatcaatacaggaggtatacattctctccttcgatcagtgtttcgtatgttttgacacagccatgatccggctcttggacttttccgtcttctaaggagattttccagtcatgcatcgggcagaagacgtattctccgctgacgataccttcagccaagacgccccctttatggggacagcggttttcgacggcgcggacgctcccgtcagaaagcttaaatacggcaagctctttatcttctatatatacggtttttcctaactcctcgggtaattcgtttactttgcctatgcaaacctttgtcatatctttattaaccatgtccgttcccccttactgttttatgaagtcgtgacgacattttcgaatagatcttgagatgcttttttatctttaaggaagtattgccacggatctttgtggacagagagtgtctcattcattctgtcgttgagctcctgccgtttttccggatcgtttaatacggattggacatgagataaaccgacgcgctcaagccatgcggatgtccgctccagatagtttgccgtttctctgtagtactgaaggtaagcacccgcatattctaaaacttcttcattcgtttttactttcatcagcaaatcaccggcgcgcaaatgggttccgccgtttccgccgacataaagctcccagcctccgtcgatgccgacaacgccaaggtccttaatgcctgattccgcacagttccgcgggcaggcggacacggccattttgaccttatgaggcgtattgagcccttcgaattttttctcaagcgcaatgcccagtgccatggagtcttgcgtgccgaagcggcagaattgttcgcctacgcacgtttttaccgtgcggagtgtttttccgtacgcgtagcctgaaggcatatcaagctcggcccatactttcggcaggtcttcttttttgacgccgatgagatcaattcgctggccgcctgtcattttaacgagcgggatctcatatttgtcgacgacatcggcgatcttgcggagatcctgagagttggtcacgccgccgtacatccggggaacgactgagtatgttccgtctttttgaatattggcgtgcatccgttcgttcacaaaacgggatgttctgtcatcctcgtatgtagccggattaatcatgcctaagtagtagttgagggcaggacggcatttggagcagccctccggtgttttccagccgagcacgttcatgatttctcttgtatgggacagccctttggctttgatttcttctacgacttcatctctcgacagtgaggtacagccgcaaatcgcttctttttgcgcggacgcgtcaaattctgagcccagtgtatattgaagaatgtcgtccacgagcggtttacagcctccgcaggaacgggatgccccggtgcatgctttgatttcgtccgttgatgtgcagcctttttcctgaatggcttgaataatcgcgccttttgaaacgccgttgcacccgcagatgatttcatcgtcgctcatcgccgcggtcatgcttgcgcctgcttcctgatcaagaggctgtaagattgatattttggaggtttcagagatatcggcttgtttttgaatcattgaaaacaggcggctgccctcgctgctgtctccgaacaaaacagcgccgacaatttgattgcccctcaggacgatttttttataaatgccgtcctgctcatcgaacactttaatcgcttttttgtcctctgattcgttaaagtcaccggcagagaagacttcgacgcctgatacctttaattgagtggagagaacggagccttcatacggttttgtttcaatgccgcaaatatgtttggccagcacttttgcctgttcatagagcggcgccacaagaccgtatgcgattccgcggtgctcggcacattcaccgaccgcgtaaatgtgcggaatgtcagtctgcatataatcgttgacaatgattccgcggtttaccggaatgccgctttctgtgccaagctgtgtattcgggcggatgccgacggccatgacgaccagatcagcttcgatgcttgtgccgtctttaaagcgtacgccttcgacacggtcagtaccgagaatttcttcggtttgcttttcaaggaaaaaggtcatgccttgtttctctaattcgttttgcagcaggcgtcccgccgctgcgtcaagctggcgctccatcaggaatggggcgaggtggatgacagacacgtccatgccgaggttcagcagtccgcgtgcggcttccaaacccagcagtcctccgccgatgacggctgcttttttatattgttttgacgcggcgagcatcgtgtctgtatcttttatatcccggaatgccgtgacgccttttttgtctgcgcccggaatcggaaggataaaagggacagagcctgtcgccaggatgagttcatcgtaaggctggattctgtctgcatcggtgatgacggttttgttttccgtgtcgactttgatgactgtttcaccggtatacagctgaatgttgttttctttgtaccagttccaatcgtttaacgtaatgtcttgaatgtcggtatcgccttgcagcacttttgacagaaggattcggttatagttgggatgaggttcggccccgaatattgtaatctcgaattcgtcttttgaaacacgcagtatttcttcaatcgctcttaccccggccattccatttccaacaagaactagctgtttttttcccatcagatgatccgctccttatctttgttttttttagcgtagcacagcaaaaacaaatatttaagatgcatgttatgaaatgtaacaaaaaatactaaaaaatctaaaaattttatgaaaaattatatagggctgattcgtaccgcgcacatcttaaaaccgggcattttacagtccgggtccaaggcttcaccaattaaatcgttgacgttttgcgtgtcagaccaatggatgggaacaaacaacgtgtcttttcgtactttctccgaccatctgctccggaccgtgatgctgccccggggggattctactttcacgagaacacggtcttcgatatgatagtcggccgccgtttttgggtggatttccacaaaggattcgaaatgtcttgcagccagggcggagctttttctcgtttgtacacccgttaagtaatgagacatcaccctgcccgtggttaaataaagcggatagccggcgctcggtttctctttcgggacggccggttcatttggaatcacgcttaattcagctctgtgatcgggatgggcaaatgagtgctcaaacaatcgcccggttccggggtgatccgcttcaggacatggccactgaatgccgccttcccgcctgagcctgtcataggtgatgcctgcgtaatcagcaattccgccgcggcttgcttctctcagttcgttaaagatttcctccgccgacgtatagggaaaataatgccctttaccaagagccgaggcaatgtcacagatgatctgccaatcatgtttcgcttctccggggcaggtgcggctcgcttctcttaatgtcacgcggccttctacatttgtcatcgtgccttcgtcttccaaataagaggaggcgggtaaaatcacatccgcgaatgccgcggtctcagaaataaataagtcaactgcgacaaaaaatctcagtttcttgattgcctgcttgacgaaattcgcatttgggccggaaacagccggattggaacacatgagaaacagtcctttgatgtcgccgctatctattttttctatcatttcataggctgagacgcctttttgcggcagctcatcctgatgaatcccccacatcttcgcaatatacgcccggtgttcttcattttcgatagaacggtagcccggaagctgatccgctttttggccgtgttctctcgcgccttgtccgttgccttgaccggtaatcgccccgtaacctgagaagggcttgccgatttttccggtgatcagcaccatatttaagaaagctttcactgccgcggtaccgtcagtctgctgttcgatcccccgcgctgtaaacagcatgccggatgtttccttggcaaacttcacggcggcctttcgcatatgctccaaaggaacacttgtctgctcggagatctctttcagatccaaagcgtcggtatgctgtttgagcttatcgaatccgtttgtgcgtgtgcggataaagtctttgtctgtaagctgttcgtcaatgcagattttgacgagtccgtttgccagggctgcgtctgtgccgggcttgattttcaggtgaagatcggctattttggtcgtcgccgtttcccggggatcaatggcgataatgtaagctccgttttctttcgctttatcaaaatacggcatgatcgtcggctggcattcggcgatattggtgccggccaggatgatgacacgtgtatgcgggatgtccgataatggattcgtcaggcccctgtccgcgccgaatgtctggccggccgccgttgctgcggcagacatacagagccgcccgttgtaatcgatgtatttcgtctgtaagccgacccgtgcgaactttccaagcagataggcttcttcatttgtaattgaggcgctcccgtagacggccatcgcatcattgccgtgttcggtttggatcagattgatttgttccttaatgcgattcagtgcttcagcccaagagacaggcacaaattcaccgttttttttaagcagggggcgtgtaatgcgggaagagtgcacggcatgctgatgggcattcatgccttttgtacataaacggccatgtgtcgtcggattatcaatgccgattgcagtgtatttcttccgtgccgcgaaggtttgttccgtaagctgcattttgcattgcatgctgcagaacgggcattgcgtctcatatgttttttccgattggacatcttgcagtttgtcacggaaataacggagcatcggttcagtcaaaaagcttcatcctttcgtatggcgttttcccggcagacaggttttgcagcagggatatgtctgaacggagatttttcagaagctgtgtccgcatatcttcttcaaacagcatttctctgatatggacgagcccgagtctgtcaacccattgataaatcgcttcgttgtagtgagctgtttcgcgataatattgaataaggcctttcatcatagcggcggtactgtcttcgttatccgtcacacaaaaaaggctgccggcgcgggcttgttttccgcggacgcccccgatataaatctcccagcaagtttgtgtctgaagcgcgccgatatcctgaatgtaagcatcggtgcaattgttttcacatgagaagctgacggatacataagcggggacggcaagtgtatcggtatctcgttcaatcctgcttgccagctcttgaaaggagcgatgctgtccgcacgtacatgctctgatttgaatcgtccagcggtgccggggggagaaaaacggcatgttcagtgcttttctgatgcttgcaaggtcatttggccttattccggaaagcctcagccggtgactgtcagtcatcgaaacctcggggatgccgtatgcttcgatgacgtctgcgatgtttttgagctctgccgcacttgtcagtccgccgtacatttgcggaatcagggtgcatgtctcttctgccgatatttcattgaactgcataaaatcaggccgcgtcctttccagataatagtgaagcgccggaatacaaatgcggcagccgttttctgttttccagccgatctctctcattacctcggcggcatcagtgaacggacggcggcgaatttcggcgatgacttcttcttctgtcaaatcggtgcagccgcaaaacgaaggctggcgggaggattttgtgtaatcatcgctcgccatatatttcagcaagtcttcaacgagcggcctgcatcctccgcaagacccggacgcttttgtcatgtgcttcacttcctccgcggtttttaagccatatttgttcaccgcttcttcaatggagcacttggtcactgagctgcattggcaaatggtttcatggggaggcatggattcaaaggatataccgccttgatccggttccatgagctgtttttttacgatggaaatgtccctttgcttcacaagactgtcgagaagccgctgtttaccgcgcgtgtccccgaataaaataaagccggccggtttatcgtcctcaaagagcgcttttttgtagatgcctgcatgctcatcatggaacaatatgccggctgtgtgctcatcctcgtgcacctttcctgccgaccatacatcaataccggctatttttaaggccgcagattgtgcaaagccctgaaacccttcgcacgggacgccgcatagatgctgcgcgagcacttttccctgttcataaagcggcgccgccaatccgtatacaatcccgtcatgctccgcgcattcaccgacggtatacacattcggttggttcgtctgcatgaattgattgacgatgattcctctgttcactgaaagtccggcagatgcagccaatcggatattgggcttcacaccggcggccatgacaatcaggtctgcttctatggaacaaccgtctttgaaacggatgccttccgcccgtgagttccctgtaatggatgccgtgtctttctctaaaagaaagactaagccttttcgttccagctctttctgcagcaggcgggatgccgtttgatcaagctgtttttgcataatggcggaagagtggtgaatgacgctgacgtccatgccgagctgccgtaagccgacggccgcttcaagacctaataaaccggcgccgatgaccgccgccttttgataccggccggccgcattgataagggattggcagtcttctattgtccgaaagccgtacacaccttctttatctgctccgggtatggggagaatataaggagaggagcccgttgcaaggatgatttgatcgtaagtcatgctgcgcttccgatccgttgtgacaacctgccgttctgtatcaatgtgtacaaccgtttctcccgtgtaaagcgtaattccgtttttttcgtaccattcgcggctattcagcgtaatgtcatcaagcgaaacctcaccttgtaaaacggaggataagagaatgcgattgtaattgggatgaggttcgcttccgaaaatgacaatctcaaacatgtcacggttcatctttaaaatgtgttcaatacagcggattccggccattccgttccctgctgcaattaatcgttgtttcttcattcgccaaacctcctttgcagctgcctgtaagattgcttctctatgagaaattatggcacattgcctgattaacgcattaaatgtgtcgcattatcttacacatgtcttttccggtgaatgccggtcatatattcttgattcagcaatttgaaatgatagaagaccggaaaggagaatgttatgaagctgtcggaattaaaaacaagcggtcatccgctcactctgctctgttccttcttatattttgatgtgagttttatgatttgggtaatgctgggggcgctcggcgtttatatttctcaggatttcgggttatcttcttttgaaaaagggtttgtcgtggctctgccgatcttatcaggatctgtgtttcggatcattttaggtgtgttaacggacaggatcgggccgaagaaaacagctgtgatcgggatgctgatcacgatgatcccgctgctttggggggcattcggcggccgttctttgactgagctgtatgcgatcggcattctgctgggcgtagcgggcgcaagttttgctgttgcgcttccgatggcgagccggtggtatccgcctcacttgcaggggcttgcgatggggatagcaggtgccggcaacagcggcactttgtttgcgacattgttcggtccccgccttgcggaacagtttgggtggcacagtgtaatgggaattgcgcttcttccgttgatgatcgtttttatactgtttatcgtcatggcgaaggactctcctgcacagcccgcaccgcagccgcttaaaaactaccttcacgttttcaggcagaaggaaacatggtgtttctgtcttctgtacggcgtcactttcggaggttttgtgggattatcaagttttttggcgatttttttcgttgatcaatatcaattgtcaaaaatccatgccggtgatttcgtcacaatatgtgtcgcagcgggcagtttttttcgccctgcaggaggctggatttcagaccgggcgggaggtgcgaaagttctggctgtactgtttgtcatcgcggctctgtgtatggcgggagtcagcagtctgcctccgctttcaacggtgatcgttctgctgtttatcggaatgatggcgctcggtatgggcaacggagcggtatttcagcttgtccctcagcactttgcaaaagaaatcggaatggtgacgggaatcgtcggagcagccggcggcatagggggttttttccttccgaatattttaggatcattgaagcagatgacgggaacttatgcgatcggttttatctctttctcatgtatcacattgctcgcatttgtgcttgttctggccgcaggctatttttggagaaaaagctgtggcactgaaaacagtcctgcggatgtttaagtttgggcggaagacacgtatgacagcgtgtcttttttatgattgattatttttcacttgattttaaacggagaatacatcagaataaatagtaacgattacgatttataataatgtacatcatgatgataataaggcaggtgcagggtataaatcgtaatcattctattttgtcaggaggctattttatgaaaaaaattccggttacagtattgagcggctatcttggtgccggaaagacgaccgttttgaatcatattttacaaaaccgcaacggtttaaaaattgccgtcatcgtcaatgacatgagcgaagtaaatatagacgcgggcttggtgaagcagggaggcggcttgtcaaggacggatgagaaactcgtagaattatccaacggctgtatctgctgcacgctgcgtgaagatttattagtcgaagttgagaaactcgcgaaagacggcagatttgattatattgtgattgaatcaacagggatcagcgaaccgattcccgttgcccagacattttcttatatagatgaagaaatgggcattgatctgacaacattctgcaggctggacacaatggtgaccgtggtggatgcaaaccgcttctggcatgatttccagtccggtgacagccttcttgaccggaaggaagcggtaggagaagaggatgaacgggtgattgccgatttattaattgaccaaatcgagttttgtgatgtactcattttaaataaatgcgacatggtgggcgaaaaagagcttgaacagctggaaacggtccttcgcgcattacagccccgcgccagactgatccggtccgtccgcggagaagtgcccgccgaatacatattgaataccggtttatttgagtttgaggaagcgagttcatcagcaggatggataaaggaactgacggcaggtcatgaagcgcacactcccgaaacggaagagtacggcatcacttcgtttgtgtactcgcggcgtctgccgtttcataccgctcgttttgacagctggctgcatcaatcaatgcctgacagcattgtgcgcgcaaaaggaattgtttggtgcgcaacccgcaacagccttgcgctgctgatgtctcaggcgggtccggcggtttcgattgagcctgtttcttattgggtggcggcaatgccgaaacttgagcaggagcagatcaaacagcaggaaccggagattctggaagattgggacgaccaattcggagaccgtcatacgaacctggtgtttatcggaacagatttagatgaagcagccattacaaaggaattggatcagtgcctgctcacgccgtctgagtttgattccgattggtcgcagcttgaagatccttttcaatgggatattcagcgggccgaataacataccggccaagtttagaagcaggtgaaaagggaaggagtgatgaaaaaggagctgaccaagtgtgaaagcactgacataccaaggaaaagaacatatggaagtgaaagaagtcccggcacccgccattcaagatgagagagatgtcatcgttcgaatcaccgcaaccgggatatgcggttcagaccttcatttatataaaaacggaatacccgccgatccgggttatatcgtcgggcatgagccgatgggaatcgttgaagaaacgggcagtcaagtcaaaaagctgaaaaaaggcgatcgggtcgtgattccttttaacatcggctgcggagaatgtcattattgcaagcaccagatggaaagccagtgtgatgaatctaatccaaatcctcatacagatgccggcggcttattcggtttttcggagtttaacggtaattatcccggcgggcaggctgaatatttacgtgttccttatgctgatttctcttcttttctggttccggcagacagtgagcttgaagatgagcaggtgctgcttctgtcagatgtcatgccgaccgccttttggagcgtccagcacagcggagtgaaaaaaggagatacagtcgtgattctgggatcaggtccgatcggcttaatggcgcaaaaattcgcgtggaaaaaaggagctaaccgggttatcgcagttgatcaagtcccgcaccgccttgaacatgcgagacgtataaacggagcagagaccttcaatttttcagaacatgatgagatcgggaaactgctgcatgaacaaacgtcagggggcgcggatgtagtgattgattgtgtcggaatggacggcacgccgctttcaaaagaaaaaacagagcaaaaaccgaatcagttcggaacgatcagtccgattcttacagcatcagaagccgttaaaaagttcggaaccgtgcagctcacgggcgcatacatttctgaagcggacggctttccgctcggtgattttttcacacgcaacgtttctttaaaaatgggccaggcacccgttattcatctgatgccgatgctgtatcaaatgatcgaacaaaatgaaattgatccgacggatatcattacacacaaaatgagtcttgcggaagctcctgctgcatatgatatatttgacaaaaaagaagatggcaacattaaagtgattataaagccatagcgaggagaaacacgatgaatatttacagaccggcgggattttggatcagattgggagccgtggtactcgactatttaattacttcagtgcctttggcgattatttttatgctggcaacaggaaaagatccgaatgagagcacaatgatcagcatcattttgactctttatgctattttgctccctgtatactggaacggttatgttatcggcaaaaagatctgcggtatccgcatcgtcaaaaaagacggcactcaggtaggcttcctcactatgattttgagagtacttgtgggcggcctgatatatggcgtgacgtttggaatcggtgtgatcgtgagcgcattcatggtcggaatgagagaagacaaacggtcaatccacgattttgtagcgggaacgtatgtcacatacgcgctgccggacgaatcgattgaaaagagcgaataatttcgctctttttttgcataaaaaatggatgagggagcaacatataacaaacgttaaaggaggaaagagtcatgaaaaaagctgcattgtctttagctgcgtttttcattacagcaatggttttcacaatgccggcacacgccgccggaacaaaaatgccttcaaccatgtcactcacggaacagcagaaaaaagaaattgaattacttgaaaaagaagtgctcgaaaaacgaaaacatgtcatatccaaatatgttgagtacggagtcctgccgaaagaaaaagcagaacatattaaacagcatatggacaggcgctttaacatgatgaaacgaaatgggtttgtcccgaagcctccgcctcataaattggaaaagcggcatcatcattcttaagcatccggcaagccggatgcttttttgtttttatcgggattgctctgaaacgcgtttcataacgtatgatatcaatatcatacgcatcaggaggatgaaacacatgatacataaaaaacagggcctgttccctgatacatttctatgggggtcagcctcggctgcctatcaggttgaaggagcctggaataaagacggtaaaggaccttcagtatgggacttattcacgaaaataccgggtaaaacgtttaaaggctcaaatggcgatacagcagtcggccattatgagcgttataaagaagatatcgccttgatggcagaaatgggtttgaaagcttaccgcttttctgtcagctggccgagaatttttccgaatggcagaggggaaatcaacgaatcagggatcgcattttacgaagacctgatcgatgaattgatttctaacgatattgagccggtgctgactctttatcactgggacttgcctcaggcgctgatggatgaatacggcggctttgaatcaagaaaaatgattgatgattttaataattactgtattgcgttatacaaaagattcgccggcaaggtgaaatactgggtcacgttaaatgagcagaattataattttcataacgggtttattacagctgcacatccgcccggcgtaaaggacagaaaacgattttatgaagccaatcatatcgcatttttagctaatgccaaagcgattgaatccttcagacaatatgttcctggcggcatgatcggcccgagcttcgcttattcaccggcttatccgcttacaagtcaccctgaagacataactgcatttgaaaacgcagaggaatttatgaaccattggtggcttgatatgtattgccgggggacttatccgcaaattcctttcaattatttaaaggaaaagggctgggcgcccgccattgaagccggggatatggaattgcttgcaaaaggcaagccggattttatcggtgttaattattatcagacgattacgtacgaaagaaatcctcttgacggtgtatcggaggggaaaatgaacacgactggtcagaaagggacaaaccaggatactggtataccggggctgtttaaaacgaaaaagaatcctaacctcgtgacgagtaattgggattggacgattgacccgataggtctgcgcatcggcctccggcgtataacgagccgctatgagctgccggtttttataacagaaaacgggctgggggaattcgataaaatagaagaagacggctcaattcaggatgattacagaattgactatttacgctcccatcttgaacagtgcagagaggccattagtgacggagttcatctcatcggctactgcagctggtcattcacggatctattaagctggctgaacggctatcaaaaacgctacggttttgtctatatcaatcgagatgaagaagatgaaaaggatttgaaacggatcaggaaaaaaagtttttattggtaccagaatgtaattgaaacaaacggtaaaagtttataaaagttccctgagagaaataagattctctcagggatttcttttacattgcggctgcatcaataatatacgtatccgcatgaagatcggataattcggcaggcactgaataacaggtaaggctgtatcggcctttcggaatattaaaagaaagccgctttgacatcacgctttcaatctcaattccatcttttacagcctcaaagggaacagtcgcttttttctcataggatggtaccggttcacttgtgttaagcctgaggacgataaatgccctcgtatttctccttgcctcaaatgaaacagctccgtcagcttccgcatatcctttttcaatggcttcatcggtccaatcgataacaggcggttctgaatctttttggaagattgtaaattgatgataagaaatggccagttcttgcggtttccatgatttattcaatgcgctgttcctcctgttttttacttgattttaaataatactctcgttccgtcgggatcattggtaagctggtgtccgacccaagagccggctccgcggttgtctgccggagaaatatattctacggaggcattatttccgccctgtttacaaaccgccatcggccattcatccctatcgtatcccgttttgacgggcacatgtttaagagattgctcacgccgcttatgtactccgtctctgtcaatggtgcatatgctggaatgcccttcttttatcgcgtccttaatatgctttgctgtttccggatatcgatcggacggaaataggattactttgtcgtaatcactcttctgaacggtctgctcgttatctgagaaaagatcacccttgatcagggccgcgactgctccggcaatgatgataagaacaagcagcagtgcttttaatgttttcaagagtatcaatcacctccagttttaattgctgtaaagctggtccaagaataaagcagaatcggccggctgtaaagctgttaaaatatatttctcagccgcaattcagctgaatatctgtaaaaccatccgcacaaatcaactttattcattaaaaattcaatcagaaagtgttttttgcagtttccctattcagaaatgaacggttgcgggtgtatcgtcaattgacttattatagcgataagctcaccggcaggatatcttcgtctgcgagtgtccgacccgaaaaccttggtctgcatgaccgtgcgcaacaagacgataaaaagacggccatctgataagaaggccgtcagcaaatcattccagattcgcatgctttgtaaacatgtctgctgaattcaattcttttttctccatgatttttagaataaccgcatcgtaaaacagcagaagagtttgttcgaataaagaacccatcggctgaatcgtctttctgtctccgccggtctcttccttaggagagccgggaatcgttattgtaagatccgcaagtttgccgagacttgagtcggggttaatcgttaatgcagtgatgatgccgttaaggcttttggctttttcagctgtatgaagcagactttttgtttcgcctgagcctgagccgatgatgacgagaccgccttcttggaggggaggagtaagcgtctcaccgacgatgtaagcgttcagaccgatgtgcatcatcctcatggcgaacgctttagccataaagccggaacgtcccgctccggacgtgaagatttgatctgccgataaaatctgattcgcaagcttgtcagcttcactgtcggatattaatgctgcggtgcgggatatttcatttagtatttcatgtaagtattcagtcgttttcatgatccttgtgtgatcagctgtttcattttagcagcagcatccgctttattgtcagctcccgtaatgcctccgccgacaatgattaaatctgggttttgtttgatggcttcaggaagcgtatcaagtttaatgcctccggcaattgcggttttagcgctcttgaccgcttttttaatcgccgtcagttcctcaaatgaattttttccttctgcttgaagatcataacctgtgtgaacacaaatataatcaacaccgagttggtcaatttcttttgcccgtgtttcaaggttttttacgttaatcatgtcgacgagaatttttttctgctgtttttttgcttcggcaaccgcccctttgatcgttgagtcgtctgtcgctcctaaaacggtgatgatgtcggctcccgcttctgccgctttcataatctcgtaaccgcctgcatccatgattttaagatcggcaagcactttcaagtgaggaaaggctgttttcatttcctgcacggctttcaggccttcattaatgacaacgggagtgccgatttctataacatctatatatggttcgacctctttcacaagttcaattgcttccgggatatttactaagtctaatgccagctgtaattccactttatatccactcctctttttcatgtatttccattctataaagtgccccgtatgttgagaagtacgcactttgaagtctaatagttactttgaggatactgtccccgcaggcaatgcgctttgtttcagcaaaactgcgtggtactataaactgatgaaagttgtgtaaaaaagtaagcgtgtatgaatagatgatgaacgtacaaaaagtaagaggaaggagaatggcccgtgagccgaatggatgagaaaacgtttaattgcgaaaaggaattgacgcttgccgtgataggcgggaagtggaaaatgctgattatgtggcacttgggaaaagaagggacgaagcggtttaatgagctgaaagctttaattccggatattacgcacaaaattcttgtgaatcagctcagggagctggagcaggatctgatcgttcacagggaagtttaccctgtcgtccctccgaaagtggagtattctttaacggcgcaaggagaaagccttatgccgattctggacgccatgtataagtggggaaaagattatatggaattaatcaacattgataaaactgcaataaaggaatctttttgaagtgctctatgtaaaatagagtgctttttttgcggtttaatgaaatcatattgcgaacattcggactgtctgtttcggttcttgcgcttttttttccgggtcagcttacgtacgtaaatttttttcattctgccataactggatattcgacgggttttcattatagtttaaagatttttaattttacgtaaataatatttttgaaaataaattgcgggatgccgcaaaataccctctggatttgtcggaatttttttcggtgtgccgcatgaaacttttcacccatttttcggtgataaaaacaatattttcatataaagtgaacgtaagtagatatatagaaatacatgcagaaataggtaaacctttcgtgcttacaatcaatggctttttgtcttgatttctcataaatttgatgccgcatttcggactgcgcgggtgaacggatgacggatttcggcggtgattgaatcgggatcgtttttggaggtaagtggttcttttggcttgagaatgagttagggacatagagggaggctgtttctaagggagaattgacatctttatcttaaaaaggggaggcgcacacatatggaaataactttttatcctttaacaaatgctcaaaaacgtatctggtatacagaaaaattctatccgaacacaagtatttcaaatcttgccgggttcgggaaactcatttctgaagacggcgtacaggctcattacgttgagaaagcgatacaggaattcgtccggcggtatgagtcgatgagaatccgtctgcggcttgatgatgagggggagcccgttcaatatgtgagcgaataccgtccgctctctatcgggcacacagatatcaggcaagccggctgctctgcggacgagctgtcaaaatgggggcgtgaagaagctggcaagcctctggcgttatatgatcaggatttattccgtttttccgtgcacacgatcagtgaaaatgaggtctggttttacgctaatgtgcatcacattatttcagacgggatttccatgacgattctgggcaatgcgattactgatatttatttggagctttcaggcgggacaagtgaggaacagacggagattccttcttttatcgagcacgtgctgacagagcaggaatatgtgcagtcgaagcggtttaaaaaggatcgggatttttggaacgggcagtttgagaccgtgccggagcttgtgtccctgaaacggagccaggcagatgcgggtcttgatgcgaaacggttttctcaagaaattcctcacgacttatatggccgcattcattcattctgcgaggagcataaagtcagcgtactatctctgttccagtcagctctgatcacttatctctacaaagtgaccggccgggatgacgttgtcacgggtacgtttatgggaaaccggacgaatgcgaaagaaaagcagatgctcgggatgttcgtatctacggtgcctgtgcggacaagcgttgacggaggacagtcgttcttggaattcgttaaaggccggatgaaggatctgatgaaaattctccgccaccaaaagtatccgtataacctgcttgtcaatgatttgcgcgcttcgaaaagttcgctgagcagattgtttacggtggctctggagtaccaggtgatgcagtggcagaaaaaagagaatctgtccttcctgacagaccctattttcagcggaagcggtacaaatgatatttcaattcatgtgaaggaacgatgggacaccgggaaattgacgattgattttgactatcgcagcgacattttcaagggggaagagattgaatctgtttctgaacgtttgatcacgctgattgaagatgcgatttcatctcctgatcgcataattgatgaacttactcttctttctgaatccgagaaagagcggctgctgaaacgggcctccggcaatccggtgaattaccgcggagagatgacgataccggggctgtttgaagagaaagtgaagtcactgtctgacaaacccgcggttgtgtatgaaggccgaacattgtcctatcgcacattgcatgaacagtcaggccgtatcgccggacgccttcttcaagccgggatatcagccgattctcctgtcgcggtgctgcttggccgttctgagcgtgtcattgcggcaatattgggaattttgaaagcgggcggcgcctatgtgccgatagatcctgactttccggcggatcggattcagtacattttggaggacagcggagcgaaggctgttctgacggaggccggaatacaggcgcccgcagcggatgccgaacggattgattttgacgaggctgttcagtatgaaacggctgcggacggtgtcagcacacaatcagaccggctggcttacatcatctacacgtcaggtacaacggggcggccgaaaggcgtgatgattgagcaccggcaagttcatcatctggtgcaatcactgcagcaggagatttatcaatgcggtgagcagacgttaagaatggcgcttttggctccgtttcattttgatgcgtccgtcaaacagatatttgcctcgcttcttttgggacagacgctttatatcgtgccgaaaacgactgtaacgaatggctcggcactgctggactattatcgtcaaaaccggattgaagccactgacggaacgcctgcgcatctgcagatgatggctgcggcgggagatgtcagcggaattgaattgcgccacatgctcattgggggagagggcctgtccgcggctgttgctgaacagctgatgacgctctttcatcaatcgggcaggacgccgcgtctgacgaatgtctacgggccgacagaaacgtgcgtagatgcgtccgtgcatcaggtgtcagcggataacggaatgaatcaacaggcggcgtacgttccgatcggaaaaccgctcggcaacgcccgtctgtatatattggataagcaccagcggcttcagcccgacggcacggccggtgagctgtatatcgcgggtgacggtgtaggccgcggctatttaaatcttccggatttgaccgcagagaagtttttgcaggacccgtttaacggaagcggccgcatgtaccgcacgggtgatatggcgcgctggctgccggacgggacgatcgaatatatcggccgtgaagatgatcaggtgaaagtccgcggctaccgcattgagctgggagaaattgaaacggtgctcagaaaagccccgggcgcggcgcaggccgtcgtgctggcacggccggatcagcagggcagcttagatgtctgcgcatatatcgttcaggaaaaaggaaccgagtttcaccctgccgagtacagggagtatgtgtccaagcaccttcctgattacatggtgcccgcttactttacaaaaacggacgaaattccgctcacgccgagcgggaaggcggaccgcaaaaagctgtttgcgcttgatgtgcaggctgtcagctcatctgaatatgccgcgccgagaaatgaaacggaggaaacacttgccgtcatctggcaggaagttctcggaatggacaaggcgggcatttatgatcatttcttcgagtcaggcggtcattcattaaaggcaatgacgcttctgacgaaaattcataagcaaatgggcgttgaaattccgctgcaatacttgtttgagcatccgacgattgcggcgcttgccgattatgcggaaaaccgaaacgaaggaccggcattcagtgcaattgagccggctgagaagcaggcgagctatccgctttcgctcgctcagcagcggacttatatcgcaagccaatttgaagacgcgggagtcggatataacatgccggctgcggccatgattgagggcgctttagaccgtgaaaagcttgagcgtgcattttctgccttaatcagcaggcatgaagcgctcagaacatcgtttcaatcagaggacggcacgccgagacaagtgattggcgagcatgttccgtttcatattgaaatgatcgaagcgcgcggaagaacgaatgaacaggtcatgaaggactttgtgcgccgttttgatttatctgaggcgccgctgttcagaatcggcctgcaaacgctcggtcacaatcgccatatgctgctgtttgatatgcatcacctgatttctgacggggtgtctatttccatcatgctgaaggaactggctgacatctacggcggaaatcagctgcctgaattgcgcattcaatataaagattatgccgtatggcaggcggaacgggcgaaagaaggctacaagaaggagcgggcgtactggaaagaagtcttcagcggcgaactgccggtgcttcagctgctccctgattatccgcggccgcaggtgcaaagctttgaaggtgaccgcgtgtccgccaagctgccgaaaatgctgcgggaacggctgcagaagcttgccgagaaaaacggagccaccctttacatggtgctgttatcagcatactatacgctgctttctaagtattcgggacaggaagacatcatcgtgggaacaccgtcagcgggaagaaatcactccgataccgaggggctcatcgggatgtttgtcaacacgcttgcgctgcgaagctccgtgaagcaggatcagacatttgccggcttgttaggtcatgtgcgcaagcaggtgctggatgcgttttctcatcaggattatccgtttgagtggctgaccgaggagctgaacgtgccccgggacatgagcaggcatccgatatttgacacgatgttcagtctgcaaaacgcctcggacggaattccggagatcggtaatctgacgctgtctcttcatgaaacaaacttcaatatcgccaaattcgacctgaccatgcaggctcgggaaacagcggaaggcattgcgcttgatttggattattgcacgaagctgtttaagcgctcaactgcggatcgcatgcttgcgcactatgtccgtctgctggagagcgcggcagctcagccggatgcgaaaatcagcgaatatgatctgctttctgaacgggaggctttgaatcaattacagcggttcaacccggaacgcacggcgtacccgaaagagcaaacgatcgtgcagatctttgaagaacaagcccgaaagaaccctgaccggacggctctacagttcgaaggggaaaccctgtcgtatcagcagctgaatgaacgcgccaacaggcttgcgcggcatattctttcggtcggaggcggcggaaaaaccgcggctgttctgtctgaacggtcaatggatatgattgtttccattatggctgtgttaaaagcggggtccgcctatgtgccgattgatcctgagcatccggttcagcggattcagcatttcttccgcgacagcagggcgaatgtgctcctgactcagcaaagcctcaagccgcttgcggaaaaggccggttttcaaggcgtcattgtgcttgctgatgatgaggcgagctatgaaaaggactctcacaatccagcattgccgtttgattccaaaacgattgccaatctcacttatacatcaggcacgacgggaacgccgaaaggaaacatcgtcacacatgccaacattttgcggacggtaaaaaacacgaactatttgactgtttctgaagaggacacagtgctcggtctgtcgaactacgtttttgacgcttttatgtttgatatgttcggttcgctgttaaacggtgcaaagcttgtgatcgtcccgaaagatacggtgctggatatgtcacgcctgtcccgtgtgatcaaacgggagaacgtcagcattctgatgattacgacggccctgttccacctgcttgttgatatggagccgtcctgtctgacgacgcttcggaaaatcatgttcgggggcgaaagagcgtctgtagaacatgtcaaaaaggcgcttgcggcagtcggaaaaggaagactgcttcatatgtacggcccgtcggaaagcacggtgtttgcgacataccatcccgtggatgtcattgaagaggatacgctctccgttccgatcgggaaaccggtcagcaatacggaagtcttcatcatgaactcagccggacgcattcagccggcgggtatcgcgggagagctgtgcgtcagtggggaaggtctcgtagaaggctactacaaccgtcctgaactgacggaagaaaaatttgtaaagcatccgtttaaggaaggtgaacggatgtataaaacgggcgacttggccagatggcttccgaatggcgatatcgagtttatcggacgtatcgaccatcaggtgaaaatccgcggtcagcggattgagcttggcgaaattgagcatcagcttcaaagtcatgaccagattcaggaatgcattgtgctcgctgtggatcagggcgcgggtgacaaacttctttgcgcgtatgttgtcggcctcagggaaatctcttcccgggagctgagggagcatacggcgaaggatcttccggcttatatgattccgtccgtttttattcaattggatgaactgcctcttacagggaacggaaaaatcgacaggcgggcgctgccgatgccggatgtgaccgcagcgaatgccgtgtcatatacggcgccgcgcaatgaaacagaacaaaaactggcggatatttgggctgaggtgctgcaaatggagcgggtcggcgtccatgatcagttctttgagatcgggggccactcgttagcggggatgaaactgctggcccttatccagaagacattcggcgtgcagcttaccttaaaggatctgttcacttctccgacggctgcggggctggcgcagctgattgaaggggctgagcggaaggcggctgagagcatcgcaccggcggccgagcgggaaacgtatccggtttcttcaccgcagaagcggatgttcgtgcttcagcagctggaaggcgctgaaacaagctataacatgccgtctgtgctccgcttaaaaggaaagcttgatgcagaaaagctgaaatccgtcatgaaacagctgacagaacgccatgaagccttcagaacgacatttgacataaaggatggagaaacggttcagcgcatatggacggaagctgatatcgacatggaatattatgaagcctctgaagaagatgctgaacggattattcagagctttatccggccgttccgcctggatcagcttcctctcgtcagaacgggactggtcaagctggctgaacatgaccacctgctgctgtttgacatgcaccatatcatttcggacggcgcttcagtcggcgtgctgatagatgaactgtcccgtttgtatggcggtgaaacgcttgagccgctgcggattcattataaagactatgcggtatggcagcagaaatttattcaatcagagcagtaccgcaagcaggaggagcattggcttcgggagcttgacggcgagcttccggtattgacgctgccggctgattacagccgtccggccgtgcaaacctttgaaggagacaagctggtcttttctctgactgaggaacagacgtcggctcttcgcagtcttgcgaaacaaacggattctaccatgtacatggtgctgctggcgtcatacagcgcctttctctcaaaactgagcggacagcatgacatcattgtgggctcgccggttgcgggacggtcacatgcggatctcgcaaacgtcatcggtgtttttgtgaatacactcgcgcttcgtacgtatccggaagcggacaaagcgttcacggactatcttaaagaagtaaaacaaaccgctttacatgcatttgacgcgcaggattatccgcttgaagaccttctgcaaaaggttgaggtgcagcgtgatacgagcagaaatccgctgtttgatgcggtattctcaatgcaaaatgcaaatgcggaagatctggtcatggaaggaattgagctgaagcaccatccgtttgacagaaaaacagccaagtttgacctgacaatgacggctgaggacacagacgaaggtttaacgtttgtgcttgaatataacaccgcgctgtttaaaccggaaacggcagagacatggaagcattactggcttcaactgttagaagccgcagcggaaaatccggctgcgaagctttctgagctttcattggtgaataaaacagaaaaacaagccctccttgacgcatggaaaggaaaaacactttctgtgccgcgggacaaaacggttcaccgtctctttgaagaaacggccgcccgctacgcgaaccggccggccgcggcatataacggcgcgaaatggacgtacggcgagctgaacgcaagggcgaaccgcatcgcgcgcattctcatggattgcggcgtcacggctgacgaacgtgtcggcattttgacgaaaccgtccttggaaatggccgcgggcgtactcggcgtcttgaaagcgggcgcggcatttgtgccgattgatcccgactacccggaagagcgtatcagctacattctgcaggacagcggcgccaagcttcttctcacacaggaagcgctgggcgtgccggacagctacaacggagaaacgatcctgcttgacggcagccgctccattttgagcctgccgcttgatgaaaacgatgaagcgaacccgcagacggaaacaacggcggatcatctcgcttatatgatttacacgtcaggaacgaccggacagccgaagggtgtcatggtcgaacaccatgcgctggtgaacctgtgtttctggcatcacgacgcattcgccatgacggcggatgataaaagcgccaaatacgcgggcttcggttttgacgcctccatctgggagatgttcccgacatggaccatcggcgcggagcttcatgtcattgacgaagcgatccggctggatatcacccgcttaaatcactatttcgaggagaacggcgtgaccatcaccttcctgccgacgcagctggccgaacaatttatggagctggaaaatacctctctccgcatgcttctcgtcggcggcgacaagctgaagcgggcggtgaaacagccgtacacgatcgtcaacaactacggcccgacggaaaacaccgtcgtcgcgacaagcggcgtcatcaatccggaggaaggatcgctttcgatcggacgggcaattgccaatacgagagtttatattctcggcgacggcgatcaggtgcagccggaaggcattgccggtgaattgtgtgtggccggccgcggtcttgcgcgcggatacctgaaccgtgaagaagaaacggcgaagcggtttaccgccgatccgttcgtgcccggcgagcgcatgtaccggaccggcgacctcgtcaaatggaacgcgcagtgcggcatcgaatacatcgggcgtattgatcagcaggtcaaagtgcggggctaccggatcgagctttcagaaatcgaagtccgcctcgcccagcttgcggacgttcatgacgcagcggtgacggccgtggaagacaaagcgggcaataccgcgctttgcgcctatgtcgcgcctcagcaggacgatattgaagcgctcaaatccgcgctgaaagacacgctgcctgactacatggtgccggcgttctgggtggagatggacgagcttccggtcaccgcaaacggaaagattgacaaaaaagccttgccggcgcctgacattgaagcgggaagcgcggcatacaaagcgccggaaacggagatggagacgctgctttccgacatttggcaggaagtactcggtcttgatcagatcggcgtaagcgataatttcttcacgctcggcggcgactcgatcaaaggcatccaaatggcgagccgtctgaaccagcacggctacaagctggaaatgaaagatctcttccagcatccgaccatcgaagagctcgtctcttatgtggagcggacggaaggcaagcaggccgaccagggacctgtcgaaggcgaagcggagttaacgccgattcagcgctggttctttgaacgaaacttcacggacaaacaccactggaaccaatccgtcatgcttcacgcaaaagacggctttgatccggagataacagaaaaaacattacatgtcctgacggtgcaccatgatgcgctccggatgatttatcgtgaacaaaaaccgtattacagagggcttgaggatgtgtctgttgaactgaacgtctttgagctgaacggacctgctgaagaccatgaggatcgtatcgaaagggaagcagaccgtcttcaaagcagtatttcactggaaacaggacatctcttgaaagccgggctcttccgggctgaagatggagaccaccttcttctcgcaatccatcacttagtcgtggatggtgtatcttggcggattttactggaggactttacgtccgtgtatacgcagctgaagcaaggcaatgaaccggcgctgccgccgaaaacacattcattcgccgaatttgccgagagaatcaaagaatacgcaaatacgaaggcgtttctgaaagaagcgcattactggagagagcttgaggaaaaagaggtatgcactcagcttccgaaagacaggcagtctggtgatcagcgcatgagacatacgagaacggtcagcttctctctgacgcctgaacaaactgaacagctgacgacaaacgtacatgaagcctatcacaccgaaatgaacgacatcctgctcacggcgctcggactggcgctgaaagagtggacgggtgaagacacgatcggcgttcatttggaaggccacggacgcgaagacattcttgacggcttgaatatcacccggacggtcggatggtttacgagcatgtatccgatgatccttgagatgaagcacgccgacgatctttcatatcagctgaaacaaatgaaagaagacatcagacacatcccgaacaaaggagtcggctacggcattctgcgttatgtaacggcgcctgagcataaagagaatctttcatttgagattgatccggatatcagctttaactacttaggccagtttaatgagatgtcggattccggcttatttacaagatccgggatgccgtcaggacaatcgctgagccctgacacagagaagccgaatgcgcttgatattgtcggatttatagaaaatgggcagatgacgatgacgtttgcctatcattctctcgaatttcatgaaaaaaccattcaatcgttcagtgacagttttaaagggcacctcttgaaaatcatagatcactgcctggcccaagacggacctgagcttacgcctagcgatcttggcgatgatgatctgacgcttgatgaacttgataaattaatggaaattctctaacagaaaagacagaggtgacatatgagcaaaaaatcgattcaaaaggtgtatgcactcacaccgatgcaggagggaatgctgtatcatgcgctgcttgatccgcattcttcctcctacttcacacaattagagcttaggattcacggaagctttcagctggagctttttgaaaaaagcgtcaatgagctgatcctgacatatgacatcctgcgtacggtattcgtgcaccagcagcttcaaaaaccgcgccaagtcgtattagccgagcggaagacgaaggtgcactatgaagatatcagtcaattagatgaagcgcgccaaaccgaatatattgaacgctataaacgcggcgtgcagcagcagggctttcatctggcgaaggatattctctttaaagcggcggtgttcagactcagtgagaaggagctgtatctcgtctggagcaatcatcatatcgtcatggacggctggagtatgggcgttttgatgaaaagcctgttccaaaactatgaagcgcttcgtgccggccggcccgccgggggaagccagggcaaaccttactctgactatatcaaatggctcggaggccgggattatgaggaggcggaacgatattggagcagccgcctggcggatttcgaacagccgagcctgctcccgggccgtctggcagcagaaaagaaagactaccaaaatgaagaatattcttttgtctgggatgaagagctggtcgcgcagattcagcagaccgccaaccggcatcaagtcacgggacctaacctgtttcaggccgtttggggtgcggtgctcagcaaatacaactatacagacgatgtggtgttcggcaccgtcgtatcaggccgtccttcagaaatcaacggcatagaaacgatggcggggctgttcatcaatacaattcccgtcagaatcaaaattgacaaagatacagccttttcggacgtgatggcggcagttcagaaaaacgccgtggaagccgagcgctatgattatgtgccgctctatgacattcaaaagcgctccgccctggacggcagcctcttaaatcatttggtcgcgtttgaaaactatccgctggacaaagagctggaaaacgggggcatggaggaaagactcggcttttccattaaagttgaacatgcttttgagcagacgagctttgattttaatctcatcgtgtatccgggaaaaacgtggactgtcaaaatcaaatacaatggagcggctttcgctcatgatgccatcgaacgaacggcgcaccatctgacccgcatgatgaaagccgcggtcggaacgcctgacgcgcccgtgcgggaactcggccttgtttcaggcgaagaagagcggcagattgttgagatattcaatgatacgaaaacggcgcttccggaagaggaggccgttcaccgtttgtttgaagcacaggcaaaccggacgcctgcaagcatcgcgataaaagaagcgggacgcgaatggacctaccgtgaagtgaacgaagcggccaaccgcctggcgagacaccttgtgaagagcgggctggaaaaaggccggaccgccgctattatgaacgaccggtctgcggaaaccgttgtcggaatgcttgccgtcctaaaagcaggcggcgcatatgtgccgattgatccggcttttccggaggaccgtctccgctttatggcggaagacagctcgattcggctcgtgctgacagttcaggactatcaagaacaagcgggcgcattgcaagtcccggtcgtcatgctggatgaaagcgcggatgaaacggtaagcggaacagacttgaatcttccggccggcggcaacgacttggcgtatatcatgtatacatccggatcgaccggcaaaccgaaaggcgtcatgattgaacacagaaatatcatcaggctcgtcaaacattcgaattacgtgccggttcatgaagaagaccggatggcgcaaacgggagccgtcagctttgatgccggaaccttcgaagtcttcggcgcattgctgaacggagcgtcattgcacccggtgaaaaaagagacgctgcttgacgccggacaattcgcccaatttctgaaagagcagcggatcacgaccatgtggctgacgtctccgctgtttaatcagcttgcccaaaaggatgccggcatgtttaacacgctccggcacctcatcatcggcggtgatgcgcttgtgccgcatatcgtcagcaaagtgagaaaggcatcaccggagctgtcgctttggaacggatacgggccgacggagaatacgacgttttcgacgagttttctcattgatcaggattatgacggttcggtcccgatcgggaagccgatcggaaattccactgcgtacattatggatgaaaaccgcaacctccagccgatcggcgcgcccggtgagctgtgcgtcggcggaagcggagtggcaagaggctatgtgaacctgcctgaattaacggagaagcagtttgtccgcgatccgttcagaccggatgaaatgatataccggacgggggacttggcgaagtggcttccggacggcacgatcgagtttctcggcagaattgacaaccaagtaaaggtccgcggtttcagaatcgagctcggcgaaatcgaggcgaaaatcagccaggcggagaatgtgacggaatctgcggctgtgatccggaaaaataaagcggatgaaaatgaaatctgcgcttactttacggcagaccaagccctttcgccggaagacctgcgcaaaacactttcggaatcacttccggaatatatgattcccgcgcacttcatccagatgaatcagtttccgctgacggcgaacggaaaaattgataaaaaagcgctgcctgagcctcaggctgaagccgttcaaaaagaatacgtagcgccgaaaacggaagcggagcagaaactcgcggacatttgggaaggcattctcggtgtaaaagcgggtgtgactgacaatttcttcacgattggcggacattctttaaaagccatgatgatgaccgctaaaatccaggagcactttcaaaaagaagtgccgattaaagtgttatttgaaaagccgaccattcaggagcttgcgcattatttgcagcatgagagcgaggaggagcagcagtttgaaccgatccgacaagcgccttatcagaagcattatcctgtttcctcagcacagcgcaggatgtatatccttaatcagctcggacaggcaagcacgagctacaacgtccctgctgtacttttgctggaagggtcagtagacaaaaagcgtcttgaggaggccatgcaggcattaatcaaccgtcatgagacactgcgtacgtcgtttgacatggcagagggagaagtcgtgcagaccattcacaaaaatgtgtcgtttgagcttgaaaccgccgagggccgggaagaagatgcagaagagctgacaaaagcctttatcaggccgtttgcgctcaaccgcgcgccgcttgtccgttcgaagctgatccggcttgaagaagaccggcatcttctgctgattgacatgcaccacattattacggacggaagctcaatgggcattttcatcggtgatcttgcgaagctttatcaaggcacggagcttgcgctgccaaagattcattataaggatttttcagtctggcagcgtgaaaaagcaagtctcgatcagcacgaagcctactggcttgatacgttcaaaggcgatctgccggtgctggatctgccgcttgatttcccgcgtcctgccgagcgcagttttgaaggggaacgcgtcatcttcgggcttgataaacaggtgacggcgcagattaagaagctgctggctgatacggatacgacgatgtacatgttcttgttagccgcttttcaagtgctgctgtccaaatattcggggcaggaagacatcatagtcgggtctccggcggccggaagacagcatcctgatctccaagacgtgccgggcatgtttgtcaacacagttgcgcttcggtcgcatcctgccggcaaaaaaacgttcaaacaatttctggatgaggtgaaaacggcgagccttcaagcttttgagcatcaaagctatccgcttgaagaattaattgaaaaactgccgttaacgagggacacaagccggagtccgctgttcagcgtgttatttaatatgcagaacatggagatcccggacctgcggctcggagatttggagatttcttcatactccatgcatcatcatgtcgctaaatttgatctttccttagaagcggctgagcgcggagaagaggtcggattgagctttgattacgcgaaagccttatttgcggacgaaaccatccgccgctggagcgctcattttgtcaatctgattaaagcctgcgctgaaaatccggatattcagctggccgacgcaagcctgctgtccgctcctgaacgggaagcgctcctttctgatgaaaaacgtacggaggcggatctgcctgagggcacttttgtttcgctgtttgaacggcaagcgcaaaaaacgcctgatctcacggcggttgcgggcggaataagtctgacatatcgtgagcttgatgaacgctcgaaccggtttgcccgccaccttcaggcttgcggaacgggcagtgaggacatcgtggccattatgatggatcgttcggccgacttgattaccgcgattctcggtgtcatgaaagccggagcggcatttctcccgattgatccggagactcctgaagagagaatccgctactctcttgaagacagcggaacgaagcttctggtcgtcaatgagagaaacatgaccgcggccgccgtttataaaggaaaaacggtcgtaatggaagacggagaatggcagaacgaaagcgccgaccggcttgaaacggagcccggcgccgaccagcttgcatatatcatttatacctcgggaacaacgggcaaaccgaaaggcgtccagctggagcaccgcaatctaatcaattatgtcacatggttcagccgtgaagccggtttgaccgaagctgacaaatccgtgctgctgtcttcttacgcatttgatctcggctatacggctatattcccgattcttcaggcgggcggcgagctgcacattgtgccgaaagagacgtacaccgcgcctgatcagcttggtgagtatatacagaaaaacggcattacgtatatgaaactgacgccgtcattgttccatatgatcgtcaatacagcccgttttacgtcagaacgccgtttcagcccgcttcgtttagtggtgctcggcggagaaaagatcatcacgtccgatgtccgcaagtttcatgacgtatacgcccataccgacttcatcaatcactacgggccgacggaaacgacgatcggcgccattgccggacggatcaatatggagcgccttgatcaatatgaacagcgtcccgtcatcggccgcccgatcgcgaataccggcgcgcttgtattggacggagcaatgcagctcgttcctccgggcgcaagcggcgagctttatattaccgggaaggggcttgccagaggatatcttcaccgtccgcagctgacggcggagaaatttctctcaaatcctttttcaccggacagcctcatgtacaaaacgggagatgtcgtccgcaggcttcctgacgggacgattgaatttatcggccgtgcggatgatcaggtgaaaatccggggctaccgcattgaattaaaagaggttgaaactgtgctgttaagcgtaaacggcattcaggaggcggtcgttctcgcagtcagcgaaggcgggctgccggaactgtgcgcgtattataaagccgacagcgagctgaaaggctctgagcttcgcaaacggctttccgaaacactgccgtctcatatgcttccggcttatttcatacaagtagaccgcattccgctcacagccaacggaaaaaccgataaaaacgcccttccgaaaccgggcgtcagccaaacggcgcaaacagcttcagccttgccggaaacggaattggaggaaaagctgtgccgcatttggaaacagacactcggtacggatacgctcggcatcgacgataatttcttcgattacggcgggcactctttaaaaggcatgatgctcctcgccaatattcaggctgaactggacaaaacggttccgttaaaagcgctgttcgaacagccgactgtccgcctgcttgccgcatatatcgaaaaatcagcggtatctgagggatatcggatgatctcaccggccgacagtgcagacgcgtatccgttatcatccgcccaaaaacggatgtacgtcctgaaccagcttgaccgggagacaatcagttataatatgccgtccgttcttctgatggaaggagaagtcaatatttcaaggcttcaggaagcgctcaatcagatgatcaatcgccacgagtctttgcggacgtcctttatcgatcaaaacggccgcccgatgcagcagatcgcagaacaggctgacattgacctgcacatctttgaagcagcggacgaggagaaagcggatcttatcattcaggcattcattaagccgttcgatctgagtgcggctccgctcattcgggccgctcttgtcagactgaatgaaaagaaacacctgctgctgctggatatgcatcatattattgccgacggcgtgtccagaagcatgctggtcaaagagctcgctcatctttacaaaggcggaagcctgccgtcgccgaacctgcactataaagacttcgccgtctggcagaatgaacccgagcaggccgaacggatgaaagaccatgagcgttattggctctccgcattttccggcgagcttcctgaattgaatctgccgaccgatttcccccgtccgccgattcaaagttttaaaggacaatccgtccgtttcagagcggggcgtgaaacggaaaaagcggtgcgtgaattaatggaatcatcgggagcgactcttcatatggtgcttcacgccgcgttccatgtctttttgagcaaaatcacggggcagcgcgatatcattatcggctcggtgaccgccggaagaacgagcgccgaagttcaggaaatgccggggatgtttgtcaatacgcttgcgcttcgcaatgaaacgcgaaaagagcagaccttcgccgggctgctcgaacgagtgaaacaaaccaatctcgacgcgctggcgcatcaggattatccgtttgaggatctgatcggaaagcttgacctgccgagagatatgagccgcaacccgttgttccaggttatggtgacgacagaagatccggataaagaaacactggaactggagaacctgcgcatcactccgtatgagtcaaaccaaggcacggcgaaattcgatctgacactcggcggctttacggatcaagaaggtctcggccttcagtttgaatatgcgactgatctgtttaaaaaagaaacaattgaaaagtggagcgccgggttcctgcggattctgaagcaagcggcagaaagtccggacagaaagctgcctgagatttcactgatcagcgatgctgaaaaacaagctctccttgacgcatggaaaggaaaaacactttctgtaccgcgggacaaaacggttcaccgtctctttgaagaaacggccgcccgctacgcgaaccggccggccgcggcatataacggcgcgaaatggacgtacggcgagctgaacgcaagggcgaaccgcatcgcgcgcattctcatggactgcggcgtcacggctgacgaacgtgtcggcattttgacgaaaccgtccttggaaatggccgcgggcgtactcggcgtcttgaaagcaggcgcggcatttgtgccgattgaccccgactacccggaagagcgcatcagctacattctgcaggacagcggggccaagcttcttctcacacaggaagcgctggacgtgccggaaagctacaacggagaaacgattctgcttgacggcagccgctccattctgagcctgccgcttgatgaaaacgatgaagcgaacccgcagacggaaacaacggcagatcatctcgcttatatgatttacacgtcaggaacgaccggacagccgaagggtgtcatggtcgaacaccatgcgctggtgaacctgtgcttctggcatcacgacgcattcgccatgacggcggatgataaaagcgccaaatacgcgggcttcggttttgacgcctccatctgggagatgttcccgacatggaccatcggcgcggagcttcacgtcattgacgaagcgatccggctggatatcacccgcttaaatcactatttcgaggagaacggcgtgaccatcaccttcctgccgacgcagctggccgaacaatttatggagctggaaaatacctctctccgcatgcttctcgtcggcggcgacaagctgaagcgggcggtgaaacagccgtacacgatcgtcaacaactacggcccgacggaaaacaccgtcgtcgcgacaagcggcgtcatcaatccggaggaaggatcgctttcgatcggacgggcgattgccaatacgagagtttatattctcggcgacggcgatcaggtgcagccggaaggcattgccggtgaattgtgcgtggccggccgcggtctggcgcgcggatacctgaaccgtgaagaagaaacggcgaagcggtttaccgcagatccgttcgtgtccggagagcgcatgtaccggaccggcgacctcgtcaaatggaacgcgaagtgcggcatcgaatacatcggccgtatcgaccagcaggtcaaagtgcggggctatcggatcgagctttcagaaatcgaagtccgcctcgcccagcttgcggacgttcatgacgcagcggtgacggccgtggaagacaaagcgggcaataccgcgctttgcgcctatgtcgcgcctcagcaggacgatattgaagcgctcaaatccgcgctgaaagacacgctgcctgactacatggtgccggcgttctgggtggagatggacgagcttccggtcaccgcaaacggaaagattgacaaaaaagccttgccggcgcctgacattgaagcgggaagcgcggcatacaaagcgccggaaacggagatggagacgctgctttccgacatttggcaggaagtactcggtcttgatcagatcggcgtaagcgataatttcttcacgctcggcggcgactcgatcaaaggcatccaaatggcgagccgtctgaaccagcacggctacaagctggaaatgaaagatctcttccagcatccgaccatcgaagagctcgtctcctatgtggagcggacggaaggcaagcaggccgaccagggacctgtcgaaggcgaagcggccttaacgccgatccagcgctggttctttgaacgaaacttcacggacaaacaccactggaaccaatccgtcatgcttcacgcgaaagacggctttgatccggacctggtggaaaaaaccctgcaagcattgattgaacaccatgatgcgctccgcatggtttaccgtgaagaaagggaaggcatcattcagacatacctccctgtcacagaatgcaaggcaagctttgaaatcgttgatctgtacggaactgacgaggatatgctgaaaagccagattcagcggcttgccgatcatcttcagggaagtctggatctggagaacggcccgctgttaaaagcggagcaataccggacagaacaaggcgatcatctgttaatcgcggttcaccatctcgtcgtggacggggtttcatggagaattctgcttgaggatttcgcttcaggttataaacaggcgcagcagcaaaacagcatcgtcctcccgcagaaaacccactcctttaaagattgggcggaggcgctgaacacgtttgcgcaatcagaagagctgaaaaagcagacggattattgggcgcaggcagatgcggaagaactccggccgctgccgaaagaccatgatccgaacaagcggctcgtcaaacatacggcggccgtgaaatgtgaattgactgaggaagaaacggcacagctgctcacagatgttcatcatccgtacggaacggaaatcaacgacattctgctcagcgcgctcggcttaacgatcggtgaatggacggaaaacggcaaagtcggcatcaacttagaaggacacggccgggaagaaatcataccgaatgtcaatatttcacggacggtcggctggtttacggcccaatatcctttgattctgcagatcagcaaggaagacggcgtctcttccgtcattaaaacggtaaaagagacggtgcggcgcgttcctgataaaggcgtcggttacgggattctccggtatctgtcatccgatgaaacagaaaaaggcgtcacgcctgaaatcagttttaactacttagggcagtttgacaatgaagtgaaaacggaatggtttgagccgtctccatatgatatgggagtccaagtcagcgaagagtcagaggcgttatacgcactgagcttcagcgggatggttacaggcggccgcttcgtcatttcctgctcatacaatcaggaagaatatgaaagaagcaccgtcgaaacacagatgcagcggtttaaagacaatctcttaatgatcatccgccattgcacggccaaagaggagaaagaatttacgccgagcgatttcagcgcgcaggatcttgagatggatgaaatgggagacatctttgacatgcttgaggagaatttaacgtgacaaaaacagatcacagaaggggggagcggagcagatgagccaattcagcaaagatcaggttcaggacatgtattatttgtcgccgatgcaggagggaatgctgtttcatactctcctgaatcccggccaaagtttttacatcgaacaaatgacaatgaaagtaaaaggcagcttgaatatcagatgccttgaagaaagcatgaatgtgatcatggaccggtacgatgtatttcgtaccgtgttcattcacgaaaaagtaaaaaggccggtccaagtcgtattgaaaaaacggcagtttcagatagaagaaatcgatctgacacatgtaacggacagcgagcaaacagccaaaatcaatgaatacaaagaacaggataagatcaagggttttgatttgacgcgggatattccgatgcgggcagccatttttaaaaaatcggaagaaagctttgaatgggtgtggagctaccaccacatcattttggacggctggtgcttcggcatcgtcgtgcaggatctgtttaaggtatacaatgccctgcgcgaacaaaagccgtacagcctgccgccggtcaaaccgtataaagactatatcaagtggcttgaaaagcaggataaacaagcatcactgcattactggcgcgggtacttagaagattttgaaggacaaacgacatttgcggagcaaagaaagaaacaaaaggacggctatgagccgaaagagctgctcttctcactgccggaggcggaaacaaaagcatttaccgagcttgcaaaatcgcagcataccactttgagtacggcgcttcaggcggtttggagtgtattaatcagccgctaccagcagtccggcgatttgatcttcggcacagtcgtttccgggcgtcccgcagaaatcaaaggcgttgaacatatagtcgggctgtttatcaatgctgtcccgaggcgggtgaagctgtctgaggataccacatttaacggcttgctcaagcagctgcaggagcaatcgctgcagtctgagccgcatcaatatgtgccgctctatgacatccaaagccaggccgatcagccaaagctgattgaccacatcattgtgtttgaaaattatccgcttcaggatgcaaaaaatgaagaaaacagtgaaaacggctttgatatggaggacgtccatgtttttgagaaatcgaattatgatctcaacctgatggcttctccaggtgatgagatgctgattaagcttgcctataacgggaatgtgtttgatgaggcgtttatcctgcgcttaaaatctcagcttctcacagcgattcagcagctcatccagaagccggatcagcctgtcaatacgatcagacttgttgatgaaaaggaaagagagcttctgcttaccggcttaaacccgccggctcagactcatcaggcgaagcctctgacggattggttcaaggaagcggtgaatgtaaatcctgatgcaccggcgcttacgtattccggccagactctttcctatcgtgaattagatgaggaagcgaaccgtcttgcgcgccgtttgcaaaagcaaggtgcgggtaaggacaccgttgtcgcgttgtacacgaagcgctcgcttgagctggtgatcggcattctcggcgcattaaaagcgggagcggcttatctgcccgttgatccgaagctgccggaggaccgaatctcgtacatgctggctgacagtgcggcagcctgtctgctgacacatcaggagatgaaagaaaaagcggctcagctgccgtatacaggaacaacactcatcatcgatgatcgagcacggtttgaggaacaggcaagcgatcctgcagccgcaattgatcccgatgatccggcgtatattatgtatacgtccggcacaaccggaaagccaaagggcaatatcaccactcatgccaatattcaaggattggtcaagcatgtagactacatggcattttctgaaaaagatacgttcttatctgtttccaattacgcctttgacgcatttacctttgatttctacgcatcaatactgaatgcggcacggctcattatcgcagatgaacatacactgcttgatacagaacggctcactgatctgatccggcaggagaatgtcaatgtcatgtttgcgacaaccgcactttttaatcttctcaccgatgcgggagaggagtggctgaaggcgcttcgctgcgtgttattcgggggtgagcgcgcgtcagtgcctcacgtcagaaaggcgcttgagatcatggggcctggcaagctgattaattgctacgggccgactgagggaacggtgtttgcgacagctcacgtcgtgcatgatatcccggattccctttcctcattgccgatcggaaagccgatcagcaatgccagtgtttatattcttaacgggcaaaatcagcttcagccgttcggagctgtcggtgaactgtgcatcagcggaatgggtgtatcaaaagggtatctgaaccgtcatgacctgacgaagcaaacgtttatcccaaatccattcaagccgggagaaatgctttaccgcacaggggatttagcacgctggctgccggatggaacaattgaatacgccgggcgtattgacgaccaggtcaaaatacgcggacaccggattgagcttgaagaaatcgaaaagcagctgcaggaatacccgggtgtgaaagatgcggtcgttgttgcggaccgccatgagtctggagatgcatcaatcaacgcctacctcgtgaaccggacgccgctttcagctgaagacgtaaagaggcacctgaaaaaacagcttcctgcttacatggtgccgcaaacctttactttcttagaggagcttccgttaacgacaaacgggaaggtcaataaacgggagctgccgaaaccggatcagactcagctggcgaaagaatggatcgggcctcgaaacgcgacggaagaaacgattgcacacatctggtccgacatcctcggcagacagcagatcgggattcatgatgatttcttcgcgctcggaggccattccttaaaagcgatgacggcagcgtcgcgcattaaaaaagagctcggtactgacattccggtgcagctgttattcgaagcgacgacaatcgcagacattgccggttatctgcttcacggtgaagaaaaaggaatgaaagatctcaccatcatgaataaaaatcagtctgacacactgtttgcgttcccgccggttctcggttacgggctgatgtaccagccgctggcaaaacagctgtccggctttcgaatctgtgcgtttgattttatcgaggaagacaaccgcatcgaacgctacacagagctgatccatcagctccagccggaaggaccggtcaagatgttcggatactcggcaggctgcacgctcgcctttgaaacggccaaacggcttgaagccgaaggacgtaaagtggagcggctgatcatggttgattcttataaaaaacaaggcgtcagcgacttagaaggccgcaccgtagaaagtgatgtccaggcgctgatgaaggtaaaccgggacaatgaagcgctgaataacgaagccgtcaaagaaggtctcgccaaaaaaacaaccgcgttttattcttattttgtgcataccgtcagcaccggcacggtcaaagcggatatagatctattaacgtcagaaccggactttgcgatgccgccgtggctcgcttcgtgggaggaagccacgacaggtgaataccgtgtgaaaaaaggctgcggtactcacgcagaaatgcttcagggagaatgtctcgaaaggaatgcggcatatttgctcgaattcctaaggaaggaacatctgaagctgacaacttcacgatagaaaaggaggaagcccgccaatggtccagctctttaaatcgttcgataccacggaaaaaacgcagcttatctgttttccgttcgcaggaggctattccgcatcattccgcccgctccacacctatcttcaaggtgagtgtgagatgcttgccgcggaaccgccgggacacggaacaaatcaaatgtcccccgttgaggattttgaacagcttgtcagtttatacaagcaggagttgaatctccatcctgaccgcccgtttgtgctgttcggccacagtatgggaggcatggtcgctttcaggctggcgcaaaagctggagcgggagggcatttacccgcaggccgtgatcatctcagccattcagccgccgcatgttgaaaggaaaaaagtgtctcatcttgatgatgaaaaatttctcgcccatattatcgagcttggcggaatgccgcaggagttagtggagaataaggaggtcatgtcatttttcttgccttctttcagatccgactaccgcgcgcttgaaagcttccgtccgtctgattctcacatcattcaatcacccgtccatgtttttaacgggcggaaggataaaaaatgtatcaaagatgcggacggatggaaaaaatgggccgacaatcccgtatttcatgagttttcggacggccacatgttcatattaagtgaaactgaaaaagtggcggaacgaatctatgagattattaacaggagcactgcaggccaattgttataggatatgacagacagcattcgctgtctgttttttgtaacaaaatccgccctcgagttttctcatttatcaaaaattttatgttatgatttgatggaatataattttgaagggattgtcgtacatgaatgatgcagcaaaagagctgaacagaacattatctgaagaaaacccgcacgtgcttcatatgctttctgatttgggcagagagttgttttatccgaaaggggtgctgacacaatcggcggaagcgaaagccaaggccggaaagtataatgccacgatcgggattgccacctcacagggcgagtccatgcacttttcccatattcaagagacactgtccgcctataaccccgatgatatctacgattatgctccgccgcagggaaaagagccgctcagacaggaatggctgaaaaaaatgcgtctcgaaaatccttcattagccggcaaagacatcagcacgccgatcgtgacaaacgctttaacacacgggctgagcatcgccgccgacttgttcgtcaatgaaggggatacactgcttctgcctgataaatattggggaaattacaatttcattttcggtgtccggcgcaaggcatccattgagacgtacccgctttttcagcaggatgggcgttttaatgcggcggggctgtccgagctgctgaaaaagcaggaagaaaaggcgattgtcgtgctgaatttcccgaataatccgacaggctacacgccgggggaagaggaagcggcagaaatcgtcagcgtgatcctggaggcggcagaagccggcaaagagattgtcgtactcgtagacgatgcgtattacaatctgttttacgatgaaacggccattcaggaatccatcttcagcaaactcgcccaagtgcacgaccgggtgctttgcgtgaaaatagacggcgcgacgaaggaaaattacgcgtggggcttccgcgtcggttttattacgtacagcacaaaaagcgaaaaagcgctgcgcgtgctcgaggaaaaaacaaaagggattatcaggggaacgatttcaagcgccccgcacccgtcccaaacgtttatgctgcgggcgatgcagtcaccggaatacgagaaagaaaaatcgctgaaatataacatcatgaaaaaacgggctgacaaagtgaaagccgttcttgcagaaaacaagcactatgatgacgtatggacgccttacccgtttaactctggttatttcatgtgtgtccggctgaaagacataaacgccggcgaattgagagtatcgttgcttgaaaagagaggaatcgggacgatatccattaatgaaaccgatttgcgaatcgcattttcatgtgttgaagaggaacacatcgcggatctgttcgaagaaatttatcaggaagcaaagcagctgcagaaacaggcggaaatatcaggctgacaaaaaaggagggggacaccctcctttttgtcttttattctgttacatttactttcccattcacattttcccggagcatttgcctgaaaacggcgatatctttttgcgaatagaaaagtcgtttcggcagcagaagtgttccgtaacccgatgtttgtaatcgaaacatatctttgtgctccctagccgagagcagttcatcccattcaaaaagaatgcttgcgtttttttgtttttggctgattccgagctgatgaatcgtaatacttctggcagatttcagccgcggattcgttttgtatgttctgtaaagacggaagaatgagattgccgttgcgatcaccgtgactgccaaagagagaatcacagctgcaaggaaattcaggagagctctgacgctccatgtgccgcctgtaaccgggccgttcatttcaaaacagatggcagaagccagcagcataatcaaaaaacagacagccgcggattttccttgatgataagcaaagtgttttcttacatcggcaaatgttaagcagcccgcgagatagatattttcatttcgtgtgttgatcatattccgtcttcgtttcctttcatttttcccctatgtcgtaatatgctttttttccgccgtcctgaagcattgcttcccaagactccgatgacgatacagacggcgccggcgatatgataccagcggagtgactcatggagaacgaggacacccgcaagcatcgtcacgatgacggacaaattgttaaaggcgctcatcttaaacgcttcaatcttggacagcgcgtagtttgacatcaatgatgtaatgagagaagacaaaatgcctaaatacagaatcgctgcgataaaaccgggatcgcggaagggcagaaaatactgcccgatcgttccttccgctccgtgccggaagagagcgatgcagttgaaggaagcaaagccgatcgcagacatgcaccaggtcagctcacccaatgaaaaacgctgggtcatgcgtctcgctgccgtattgtaaagggcggaggacagcgcggacaacaggatcaggaaagcacctttaaaactcgccgattccgcggacacccctttcattgtgaaaataaataccaccccggccactgacaggcatgtgaatcccttttgcgcccatgtcggacgttcctttaaaaagtaagacgaaaacagcatcgtaaaaatcgggatggcggcttgaatgataccggcttccgatgatgaagaatacaaaaggccgaacgcctgaaaactgaaaaacaaagccggatataaaagggccaaaggcaagatcgccagcacattcttccagctgacggacagtttgatccagccgaataaaacaggaagcattgcacagatgaaggccgctgtgaaccgatgagccaatatatcaaacggattggcggattgaagcgcaatcttgacaaatataaaggaaaaaccgataatcagcgcatttaaaatggcagcgaggtaagcagcagccaaacggttttgattaatcatctttacgaactcctttaatgagatcgagcgccggccgctcccttttattgtatgggaagggaagaagcagtacaatgagaataatgataaactgtaccggtacagatggaggttcagcatggaaaagtatatgaacgtgatgatagaagtggagagtctcattgaaggcggcacttttcaggaaggggcgcggctgccttctatcaggcagctggccgagcgttttcacgtcagtaaaagcaccgtcatccgtgcgcttcaggagcttgaaaaacggcacattatttatgccgtgccgaaaagcggctactatcttattaaaaatgaaaaaaagcaggagcgagaacaaacaggtatcattgattttgcagcctcggcgccggaccctgatatttttccgtaccgcgactttcagcattgcatcaacaaagccattgatatgtataaaaatgatttgttcatttacggcacgccgcaggggcttccgtctttaatccgggtgcttcagaggctgttatccgattatcaggtatttgcaaaagagcggaacatttttatcacctcgggtgtgcagcaggcgttatccctgctgtctctgatgccgtttccgaacggaaaaaagaagattttaatcgaacagccgggctatcatctgatggtggagcagcttgaagcgctgcgccttcccgcctgcggcattaaacggacggctgaggggcttgatatggcggaagtcgagcggctgtttcaaacggaggaaattaagtttttttacacgatgccccgatttcataatccgctcggcagctctctgacagaatggcaaaaacgagagcttgtccgattagcggaggcgtatgacgtttatttggttgaggatgatttcctaggagatttagaggacaatcagaaggcagacccgctgtacgcctacgatctgtcttcccgcgtgatttatttgaaaagcttttcgaaaatgatttttccggggctgcgtgttggagcggctgtgctcccggattcgctggccccggttttccatacgtataaaaagctgagcgatatcgactgttcgatgatatcccaagcggcccttgaagtgtatatcaaaagcggcatgttcaaaaggcataaagaaaaaatccgggcctcttacagagcacgttccgagctgctccaaaacgcgctgcaggagtacggcggtttttctgtaaagcaaacgtcgatccatacccatctcgtgctggagaaaagcctttccgcttcaagagttgtgcagcgtctgaaagcgcaaggcgtgctggtggagccgattgagagccattacctatcggattttccgaaagaaaatatcatcaaactcaacgtgtccaacgtcaagacaggggatatcacgcgaggcatcaaaatgctgacggattgcttataacagctcttcatacgttttcatctcaatcccgtcacaaaaatcgggatgcgccgcacaaacggccagcttatactcctcgtccgcctcatatgtgcggatgaaacaaggttcatgtccgtccggaagttcaatggacacatggccgtcgtctttgaggcggacgctgaatgaatcaagcggcagggaaagcccttttccggcctgtttgataaagctttctttcatcgaccacaggtggtaaaaataatcggtctgctgatcggggtgtttcgcttgcagatcactgtattccgtcggcgaaaaaaaccgtttggcgatatcaaccgtgccgggcttcattttttcaatatcaatgccgatcggttttgaatcaacggcgcacacgatccagcgaccggagtgggaaatattaaagtgcatgtccggaagcgcggggatgtacggctttccgtattcctgaacgctgaatgaaatcccggccggatcaagtccgtaagccttcgccgcagcggtgcggatcagcatgtcgccgatcaaggtgcggtgagcatcctccttatggtaaaagcgccggcatttttcccgcttttcggcggacacggccgccatcatccgatcctcttcccctgcagaaagcgggcggtccatatatactccgtaaatcttcatgtccgatcctccgtctgaaaatattgtcaaaaccatcctatcatatcagacgaaagctgtccgaaaataaaaaaacaaaaccgtttcggctttgtttttaatgaacggacgttgcccgcccggagatcgcgtatgttaacagtttagaggactgcggcaaagaaaaacgcagaatcagccccgtcaaaacagccgtaataatggttccggcaccgataggtccgcccatcatccaggctgcggcaagaatcgtcagctcaatgccgttccgcacccattgcacgttccagcccgttttttcagatatcagcatcatcagagagtcccgggggcccgcgccgagccctgctgatacgtaaataccgacgccgcagccgatcagcagcaatccgatagaaaaaaacacggccgctaaggaaaaagcgtgcgtctcaggaagcagaaacgaaaagaaatcaataaacattcccatcagcaccatgtttaagatagcgccgattttcgggagtgtccttgtgaacaggcaggttaaagccacgatgactgcgccgaccacgatggaccattggccgacagaaaacccgaaatgttgaaaaagcccataatgaaaggcatcccaagggctgatgccgagagcttttcctttaatggttaacgataccccgaaagacaaaattaacagaccggcaaaataaaacgtccagcgcatcaagaattcccgcttcaaagaggtcccttctttcataaaatttcattaattgtcattgtagcataaccgccaaaaaaaagaagaagcgaaatcagtgtttcgcttcttctcccgctcctacaaaggattcagtatacgatttaaaaaccgctgcgtgcgttcttctttcggcgcggagaaaatttgctccggcggtccttgttccacaatgacgccgccgtcaatgaagatgacttcatcggccacttcctgcgcgaatttgatttcatgggtgacgacgaccatcgtccagccttcgttcgccagatccttaatcactttgagcacctcgccgaccagctccggatcaagcgctgacgtcggttcgtcaaacagcatcagctcgggctgaatcgcaagcgcgcgggcgatgccgacacgctgctgctgaccgccggaaagctggaacggatataaatccattttgtctttcagtccgactttttccagaagctccatcgcttcttttctgacttgctccttgtcgcgtttttgcacttgaacgggtccttccatgacgttttcaagcgccgtgcggtgaggaaacagatgatacgcctgaaagaccatgcctgatttgcggcggaggcgaagaatatcagcctgcttcacttttttggagaaatctattgaaaaatcggagaatgccagctcgccgcgattgggaatctcaagcgcgttcagacagcgcagaagcgtcgtttttcctgaaccggacggccccagaatggcgatgactttccctttttctatctccatatctatcttttttaaaatttcattctgtccgaatgatttatttaatcctttgacggaaagcatatcgaaacctccttatttggccacataacggtcgagacgccgttcgatcacgtgttgtacgattgacagcaagaagcagatgatccaataaataaaggcggcttcaatatagatgaccaagatttgatcaaggttttgcgcgccgatttcctgcgcttttctgaacaactccgcgacgagaatctgtgacgcgagagatgtatccttgatcaggctgataaatgtatttgataatggcggaatggacacgcgaaacgcctgcggcaggatcacgcggaacaatgtcttgcgataggtcatgccgatcgtataaccggcttcccattgccctttcggcacggatgaaatagatgcccggatgatttcagaagcgtaggcgcccacgtttaatgaaaacgcgatgactgcgcttgggaaagggtccagcgtaatattaaatgtcgggaacagataaaaaatgatgaacaattgaacgagaagaggagtgccgcgcaccgctgatacgtatacgctgaacacccatctcaatggtttcatatttgacattctggcgagcgccgtaatcagcgcgatgatcatcccgaaaataaaggaaagaatggtaaggggaatcgagtaatagattcccccggaaagaatcggccagaatgactgctgcaccagatcccaaggaatggctgttgcaatcacggtttccggcatgttacttagaaacatcttcgccgaaccattttttcgctattttagaaagagtcccgtcctctttcatttcttttaacgccttgttgacgtgagtcacaagttcgccgcttccttttcggaatgcgaaatacgtctgctgcggctggcctgcttcaaacgcgattttcacgtttttattgccggacgtttttaagtagttcagtacggcaagcttatcgttgtaagtcagatcagcgcggccctgctgaatgagctgaagggattgcgccatgccttcaacgccttcaattttcgcgccggcttctttcgctaatttattgtaattgcttgttaatgactgagccgctgtttttcctttgacatcagcctctttcgcaatcgtgctgtcttttttcgtcacgacgactgcatttgacgttgtgtatttatccgaaaaatcatattggttctcacggcccgttttgccgacttggttggcaacgacgtcaaaccgtttcgcgtttaatccggcaaacatgctgtcccattgcgtttctttgaagtcagctttcagatcgaggcgtttcgcgacttcttgaatcacttcaacatcatatccggtcagtttgtcactctttttatcatggaaggtaaacggttcgtacgttccttctgtgccgacggtcagtacgccttttttcttgacagaagcccaaagatcgccgtcttttgacttagatccgctgtcctgtgagtttccgcaggctgcaagcattgcgatgctgaccatcatgaacaaagcgaataatgcttttttcatcttctttattccccacttttctgagtagttttattgagaaaaaatagctcccaattgtaaaggataacttttttttagtatgagtcaagtaattggttttcataagcgggaattcttcgtgttccggatcaaaataattccaaaaactgtctgaccggcttcggcagatagctgtcttttctccagatgacggccggtgtcatgacaaacgggttgtcttcgatgataaccgttttgacatgcgagcgcatatggacgggaatcatcgtcaaaggcagaattgtggcgccgaatcctgatgatacgaggctcaagagcgtcgcggagtcatggcattcacagacaacctgaaggtcgagaccgtactgttcacaaacttggaggacttggtcatacacacctcttccattgacggtgcgcaaaaggatcaaaggcaaagaggcgatgtcattcagtttaatcgtttctccgcacagtcgttttgaatgctcggacagcaccaatacacacggaatgtcttcaagctccttcgattcaatgccgtcgtttttaatcaaggtggtggtcacggcggcgtcaatctgccgggtttccagaagctcgagcagtgagacgggctcatcttcccaaatgttaaaggtgagatggggaaaccgctctttcatctgtgacactttctcaagcatgagggctgcgcagtaaatggttgacccgacggcaagtgtgccggccacctcctccttcagctcttgtacctcgataatggcatcctcaaacttatgaagaatctctttcgctcttttcaaaaagacatttccttcatatgtaagggtcatgtgtttctttttattgcggtcaaacagaatgacgcccaattcttcttcgagctgtttcagctgtctgcttaaaggcggctgtgccatatgaagctttttggcggccgtcgtgattttctgctcttgggcaatggtgatgaaataacgcaattgccggatatccatgagaacgcgctcctttctgttatacctttaaggtatgatacatagatttaacgaatatttttcatatggatatatcaggagtatgatggttttgacaccacatttcaagcgtaaaggaggggtcgatatgaagctcgtcatcggaatgaccggggcaacgggagccatattcgggatcaggcttttagaatatttaaaagccgcggagatcgaaacccatcttgtcgtgtctccttgggcaaatgtcaccattacacatgaaaccgattatacgttaaaagatgtcgagaaactcgcatcctatacgtattctcacaaagaccaagccgcggcgatttcaagcggttcgtttgaaacggacgggatgatcatcgctccgtgcagcatgaaatcactggcaagcatccgcaccggaatggctgacaatctgctgacaagggcggctgacgtcatcctgaaggagcggaaaaaacttgtgctgctgactagagaaacgccgctcagccaaatccatttagaaaatatgctagcgcttacaaaaatgggttccgtcattcttccgccgatgcctgcattttataacaagccggctgacatggatgaattgatcgaccatattgtgttccggacgctcgatcagttcggcatccgtctgccggaagcgaaacggtggtacggaattgaaaaacaaaaaggaggaatctgataatggcctatcaggattttagggaatttctcgccgctcttgaaaaagaagggcagcttttaacagtcaacgaagaggtaaaaccggagccggatctgggcgccgctgcgcgtgcagccagcaatctcggggataaaacccctgcgcttttgtttaacaatatttacggacatcaccatgcgcaggtggctctgaatgtcatcggctcgtggccgaatcacgcaatgatgctcggcatgccgaaagatacgcctgttaaagaacaattctttgagttcgccaaacggtacgatgcatttccggtgccggtcaaacgggaagaaaccgcgccgtttcatgaaaatgaaataacggaagatatcaatctatttgacatccttccgctattcagaatcaaccagggggacggcggctattatttggataaagcgtgcgtcatttcccgcgatcttgaagatccggacaatttcggcaagcagaatgtcggcatttacagaatgcaggtaaagggaaaagaccgcctcggcattcagcccgtgcctcagcatgatattgcgattcatcttcgccaagctgaagaacgcggcgtgaatcttcccgttacgatcgcgctcggctgtgagccggtgattacgacagctgcttcaactccgctgttatacgatcaatccgagtatgaaatggccggcgcgattcaaggggagccctacagaatcgtcaaatctaaactgtctgatttagacatcccttggggcgctgaagtcgttctggaaggagagatccttgcgggagaacgggaatacgaaggacctttcggtgagttcacgggccattattcaggcggccgcagcatgccggtgatcaaaatcaaacgggtatatcatagaaacaatccgatttttgaacatttatacttaggcatgccgtggacggagtgcgattatatgatcggcattaatacgtgcgtgccgctttaccagcagctcaaggaagcttatccgaacgaaattgtcgccgtgaacgcgatgtatacgcacggcctgatcgccatcatttcaacgaaaacgcgctacggcggatttgccaaggcggtcggcatgcgcgccctgaccacgccgcacggactcggctactgcaaaatggtcattgtcgtggatgaggatgtcgatccgtttaacctgccgcaagtcatgtgggcgctctcaacgaaaatgcatccgaaacacgatgcagtcatcattcctgacctgtccgtccttccgcttgacccggggtctgatccggcagggatgacacacaaaatgattcttgacgccacgacgcctgtcgcgccggaaacaagaggccattattctcagccgcttgattctccgctgacaacgaaagagtgggaacaaaaactgatggacttaatgaatcaataagaaaggatgaggttgcaatgaaaacatgcccgcgctgtgaatcgaaaaaaggagaaaccgtcagccaatcgccggtcaaaggcgcctgggaaatttaccaatgccaaacctgctttttcacatggagatcctgtgaaccggaaagcatcacgaatccggcggcattcaacccggcatttaaaattgatccgaaagaaacggagacggccgcacatgttcccgctgttccggaaagaaaagcgtaatgctgacggagcacttgccggaggcgctttacacacttttagacgggacggagcttgaaaaaaagcagcacgacgcatttgtgctccaatccgtgacaaaagaaggccgtccgcacgcggccatgatcagcgccggtgaaatcgtggccgtgagcagaacaaatctccggctcgccttatggaaaaacacgacgaccgtaagcagccttctgcatccgggaaagctcttttcatcgcctggcacggaggagccgcatattacgtcacattggaatgtgaggcgcttccgccgctgaaagaggcgaaacacgagcgggaacggttcagctgccgcgtgatcaccgtcaaggaagatcgggcgaaatacgcggatctgacatccggaccggccatccagctccacgaaccggaagatgtcttgaagagatggagagaaacacttgaggagttaaaacaatagacgcatcaaaaaagcctgcggacgattccgcaggcttttctttatctgttattgaacgcctttcatcgcccgtttaatgacgggagacagaagaatcaaaataataccgagaatgatcgaaataagaccgattgagccgaagtaggccgcttcagaaatcttatcaaacaaaccgactacttttgcgttcagggcttgaccgcaggcgtttgttaaaaaccacatgctcatcgtctgcgctgagaaagcggcaggcgcaagtttcgttgtgacggataaaccgaccggtgaaaggcaaagctcaccaagcacaaccaaaaggaagctgagcacaagccaaagcgggctcacaagctcgccgcttccgcccataaccggaagcaccatgactaaaaatgataatccggcaaggataatgccgatcgcgaatttaatcggtgttgaaggctggcgtttgccgagcttcatccagatccaggcgaacaccggcgcgaaaataacgatgaataatgggttcagagactggaaccatgaagactcaagatgcatgcccgcaaaggaaagtctcgtgcgctgatccgcatataaagcaagaatcgtcgcgccctgctcctgaatcgcccagaacattgccgctgcaacaaacagcggaacataagccgcaagccttgatttttccgttttcgtcgcttttttgctcgtgaacatcacgataaagtaaataaccggaatgacaataccgaggatactgaccgtatcaatcacacgctggatcgtcagccagccggtttgaatcagaacgatgataacggctgctgcgatgaccactccgattcccgtgccgatcactgatgatttagaaatcggattcggtacattggagcctgctttgccgaggtatttctttctcgtaagagcgaaaacaatcagtccgaggaacataccggccgcggcgcatccgaagcctaagtggtagttgtacttctgtccgagtgttccgacaattagcggcgcaagcaatccgccgaggttgatccccatgtaaaagatgctgaaacctgagtcgcggcgctcgtcttccttcgtatataaatctccgacaacgctggatacgtttggtttaagcaggccggttccgataatgatcagagccatgctggtaaaaaacgccgccgtgctgccagggaaggcaagagcgatgtgcccgaacataattaaaattccgccgtaaaatacggtgtttgccgtgccgaatacccggtcggccagccatccgccgatgacgctcgacatgtatacgagagacccgtatatggacatgatggcaactgcggtcgttttatcaaagccgagaccgccatgagcgacttccgtatataaatagtaaagcaatatggctctcataccatagtaggagaaacgctcccaaaattcggtgaaaaacagtgtgaacaagccgcggggatgaccgaaaaagcctcgttgcggcacagtttctgttatagagtccttatcaatagatgccacctgagccaaccctttcttaaaaaagtgtattacaaaaatcatattcttatataatacttgtgtcaatataatttatactgaattcaaaaaattccagaatgaaaagatattaaaacgttgaatatagacgaattttcctgattccaatgacttattttgttatattatctgactaaactatctttataaacttttttaataaaatttaaagtatgtacaggcggagcgggatatggcggaataagatgacaataagagaggaaggaggagattatcacttgccgaatcgtatattggatattacggattgcggtgtggcggcagacggaaaaaccgatgtgacgggcgccatcaaccaatgcttggccaaggccgtcagcgaaggctgtcatacggtgttttttccgccgggaacctataaaatcaacggcacgcttggcggggacagcagccagccgtttcggaacgccgggattaacgtgccgagccatctcaccatcgttttagatccggaatgcacgattaaagtggcgccgaacagctcctggggctactcggctttctatataggcaggcgtgaaaatgtcaccatcaccggcggccggattatcggggaacgggatgaacacacgtataccaatgtccctttgcgttcgacccatgaatgggggtttggaatctgtattgaaggcagcagcaatgtgctgatcgaaaatgtgaagatttcggattttacgggagacggcattattgtcagcccgctcgggttaaaaacaaacagtgattacgaaacttcagaacaggtgaccatccgccgctgtgagatcaggcagtcaaggcgaaacaacatttcaatcaccggctgcaataccgttacggtggaagaatgcgtgattgaagacgccgggcaagggaacggaacggctccgaaattcggaatcgatattgaatcgtacggagaaggcgatattgattatgaagaagctcttcatattacggtccgcaacaacttcttttccggaaacgccgtaagctcagtcaccaactttaacggatataatgtgttaattgaaggaaatcattccgataacacaatcagctacgggtatggggcacataccgtcatttcggggaatatcttctttcggtcagacggcggctcaaggaccgcagtcgccggacaaggtgtgtcacagggacaggacagcagcaatgccgtcatttccaacaatctgattaccggtttttccaccggaatagatgtaaggggaaaaagcgtcctcgtcacccataacaaaatcagtcaatttgaaaatacgggcatttccgtctatcaggcggaagatgtgaccgttgacggcaatgtcattgaaaacggacgttccgaaacgagacgaagcacggggatgcgggcgacgctgtcggaaaacgccgtctttatgaataatactctgaatcaggtaacggacggaatcagcatgtcggccggcaatatcaccgtaaaacaaaatgtgctgaaatcgttcagccggggcatatgggtcacaggcggaaatgccgttattgaaggaaatacgctgattccgaatgcgtatcagggcgtcgcggagtcctatgccgtatctgtgacaaatgacgccagggctgtcatcaagggaaatctcttcaaaagctacaaaaactatcccattttcagttcaacatcctcgggaacctctgtcatcagcaaccgttttgaatcatcaccgcttatcgttaccgtgtatctgaattcaggcacgcatgaagtcatagacaatacgctcacgatcaaccgaacggcgggcagcccgatcggcatctatctgaacggatcctcaaattccctcgtgtcgggaaataccatcaacaacctttccgccgcttctgcttccgccatccaaaccaattcctccgcaagtactaaaatcatcggcaaccgcattatcaaaggcgtcattgtgaaacacgcgacagatacggacagcggaaatatcgtcatctgaaaacaatctgcatcggaaaaataaaaagaacacatgaactccgaaagaaggagggatgtgttcttttttgacacaatacagccgtgcgcctgtcaggcatcttttttacctgatttatataaaacgatcatttctctgattaaaaagagggcgaataaaaacagcatcagccattctgagaaggtggtcaatttaaaagcggacaggttgttttggaccgctccatagaaactgaaaccttgcagcatatctatcgttactgaaatgatcagacaggcagccagcaaaaaaaatgaaacccccaatattttcatgcgcatcactcccctttttatccttttcgattacgcagaacttatacagactttccgccgtgcataatcttttgccgtacaggaagaatatgaaaaaaacgaggaaaggttttttgcgatatgccgccattttttaagcagaagaaacaaaaaaaagccgatcaaaacgaccgtgacaatgaaggcagaaaagaagcggacagccagccggacaaagagcgggatgagccgatctccctcagcttaaagcaaaatatgaagaagctgtctgagaggttcggcaacagtgccgatgtcgtcatccgccggctgaaaatcggaaaagaagagcttccgtccgcaattgtgtatatcgccggtttggtagacgaacagctcgtcagccaatcccttctggaggatttaatcgacatcccgtccgttcagccggaacaagcggtctgcctgatatacgataaaacgcttgcgatcggcggggtgaaagaggaagaaaaatggaaaagtctttatgccgggctggtggcgggcagcacgctcatttttgtcgacggggctgacaaggcgctgatcgccagcacggaagggggagagcaccggtccattcaagagccgagcactcaggtctctttccgcggcccgcggcagggtttcactgaatctctgcaaaccaatatttccatgatccgcaggtatgtaaaaacgcctgatgtatgggttgaaaaaatggagatcggacacgaaacgaatacggatgtcgcgctgatgtatattaacggaatttgcgataaaaagctgattaaggaagtccgccggcggctgaagcacattgacatcgacagcattctggaatccggctacattgaacagctcattgaagacgcgccgttttctgtgttccccaccgtatatcatacggagcggccggacgtcgtggcggggaatctgttggaaggacgatttgcgattatcgtggacggaacgccgttcgttctcatcgcgccggccttatttattcaattttttcaatcggttgaggattattattcacggtttgatattgccacaagcatcagggtgctgcgggttttgattttcttcatttcattggtggcgccggggatttatgtggcggcgacgacctttcaccaggaaatgattccgacgcagctgctgattgtcatcgcggcccagcgggagacggtgccgttcccggccgtgattgaagcgctgacgatggaagtggcctttgagattctcagggaggcgggtgtccggcttccgagagttgtcggctccgccgtttccatagtcggagcgcttgtcatcggccaggccgccgtgcaggccggcattgtttccccagccatggttatcgtcgtcgccctgacggcgattgccagctttgcgaccccggcttttgacatggcgatatctgcgcggctgatccggtttctctttattctgtcggcggcggtcatgggattttacgggctgattctgggcattatcatgatgtttgtccatctgtgcggcctgcgttcattcggatttccgtatatgtccccgctcgctcctttaaccccgggcgggctgaaagattccctcctccgagctccgttatgggcggatgaaaaaaggccgggactgctcgtgcaggaaaacaacaggcgccaaggggaacatcaaagaccgaaaccgaagacatccagaggaatggttaataaagatgtagaagagggcgacggtaatgaaaagacgtaaatggatgcttatcctttgtacgatggtttcccttatgtttgtatccggatgctgggataaaagggagcttaccgatctagcggtgatctccgccatcggtattgaccgaaccgaaacgggaaaatacgtccttcacttgcaaattatcaatccgggaaacgtggccggcggtctgcagggcggcggagcgggagaccggcctccggtttccgtctattcggtgtccggagacaatatgacggaagctttgagaaaaggctcgatgaaagtgtccagaaggctctattttgcgcatacgaatctcgtggtgttcagtgaaaaactggcgaaagaggaagggctcagttttattctggacaatcttgaccgcgacaccgaattcaggacgaccgcaaccgttgtgatcgcgcataattgcaaggctgaagacattattaaagtgctgacgccgattgataaaatcccttccaataaagtgaacaagacgctcagcttcacgcaggaacaatacggcagagtcattaaaaccagccttcaggacgttctgattgatctcgcttctccggccgggtcgccgtttattcctggttatgaaatgcacggagacgataaagccggtcctacgatggaaaatacgcagacaactgaaccgaaagcagtgctgtcagcggacggactggcggtgttcaaaaaggatgggaggctggattactggattgaggatgacgacagtgtgggggctgtatggctgctcaataggatcaagcatacgttcatcaatgcggattggaagaacgtgaagcatgcaatcagtctgcaggtcacccgtcagaatacaaaggtgacggccacttttccgaacggaaaaccgcatattcacgtgcatgctcaggtcgaggggctggtggacgctatcagataccctttccatctgtctgatccgcaagtgctgatgacgatgcaaaaggcgctcagcgtgcagcttgagaaagatatcaccaaatcgattgaagatataaaagcccataagaatgacttcgtcggcttcggagacctgatctatcggaagcatccggacaaatggaaaaagttcaaagggaagtgggatgaagaatatttccccaatctccccgtagatgtcaaaacggaagtcattatcagaagaacgggcttgcggaataatcctctctcagacaagcttgagcatgattgatttgaggagaaaggagcgaagcgtatggaaaatgcgaaaatcggcacgcgtcagctgtttattatgatcattttgtttgaattgggcagttcgttattgatcccgccgggcacgatggccgggcgggatgcatggctgtccgtgcttctcgggtgcgttatcggtctcggacttttctacgtttatcaggcgctgtatcaattttttcctgagtcttctccgagagattacatgaacgaactgatcggcagacatctgagctgggcggtctcccttctttatattctctattttgcttatatcgccgcccgcgtattgcgggatttcggcgaaatgcttgtcaccttcgcctatcaggacacgccgattttaattgtgaatgccatgctgatgatcgccgcgatatttgcggtcagaaagggaattgaagtgatagcgagagccggcgagctgctgtttggcattatgtatttcctgacagccgtcgggctgatcctcattatcagctcaggcacgataaacctcagatttctccagcccgttttagcggagggtgcaggaacggtcatttattccgtgtttaaacagacgatgttcatcccgttcggtgaattaatcgtgtttgtcatgattttcccttatttaaaagatcggaaaaaggtgaagaaaaccggatttctggcgattatcatcagcgggctgtttttggcaatgtcagtggcgattaatatttgtgtgctggacgtcaacttaatgctccgctctcaatttccgctgctgagcaccatacagacaattaaagtggaagagtttttagaccggctggatgtctttttcatgctcgtgctcgtcatcggcggttttttcaaagtcagcctttttacatatgcggttgtcgtgggcgtgtccacgctgtttaaagaaaaaaatccgtcccagctggccttcccggtcggattgggggtgctgattctctccatcagcatcgcaagcaatttttcggaacatatgaatgaaggcttaaacattgtgccaatctatattcatcttccgtttcaagtgctgttccccgttttgctgcttatcattgccgttattaagaaaaaggtcaaagggaccgtctatacagtttcgaagaaataacccggccggtgcgccgggttattttaaaatcatgatttttgtcttcatgcattgacaaacttgcctgacaattgtacattttgatttattcttataaaattactaggaaatataggtttagtggtgttaatatgttctgaaccgtatttcagaatagaaggagatccatcatgacaaagaaaaaagaaatcaaactcggtgtgtttctcgcgggcaccggccatcatgtcgcttcttggagacatcctcaggcaccggcggacgcgagcatgaatttggattatttcaaagaactggcgaaaacagcggagcgggggaaattggacatgctgttcttggcggacagtttatcaatagacggcaaatcacatccgaatgtgctgacgcgctttgagccgtttacgcttctgtcggcgctcgctcaggtcacatcccgcatcggtctgacggcgaccgcgtctaccacatacagcgaaccgttccatatcgcgagacaatttgcatcgcttgaccatctttccaacggccgcgcgggctggaatgtcgtcacatcttcgattgaatcgaccgcgcttaatttcagcggcgaaaagcatcttgagcaccatctcagatatcagcgcgcggaagaattcgttgaagtcgtcaaaggattatgggattcgtgggaggaagacgcctttatccgtgacaaagaatcaggagcatttttcgataaagacaaaatgcatgaattgaaccataaaggaacatatttctccgtgagagggccgttaaatgtcgcccgcacacctcaagggcgcccggtcattattcaggccggatcatcaggagacggaaaagcgctggccgccaaaacggcggaggtcattttcaccgcgcaaaatcatttggaatccgcgcaggaattctatcaatctattaaagaacaagcggcttctttcggccgtgatcctgaaaaaatcgcgatcatgccgggaatttttcccgttatcgccgataccgaagaagaagcgcaggcaaaatatgaagagctccaagacctcatcattccgtctgtcggcctgaacattctgcaaaactatctgggcggcgtcgatctttccgcctgcccgcttgacggcccgctgcctgaattggatgcggatgcgtcgaatgccgttaaaagccgcttcaagctcgttcaggagatggccaaacgcgataacatgaccatccgcgagctgtacaaatatgtggcgggttcaagaggccatcatatctttgtcggaacgccggaacagcttgccgataagatggaagaatgggtcggaaaacaagcttgtgacggcttcaacatcatgccgccgcttttgcctgaaggtctcactctttttgtagacaaagtgattccgattttacaagaacggggcgtgttcagaaaagagtatgaaggaacgacgctcagagaacatttcggactggaaaaaccggcaaaccgatatgccgactaaaggagggctcatcatgttaagacaataccggctcgcaacggaggcagacgctgatgagctgctttcactgacactgcgggcgtatgaaccgatccgaaagctcggcatcaactttgccgctgccacggcggataaagaactcgtattaactaacatacagaaaaacgcctgttacgttttggaggaagacggccggattctggcgacgatttctctgcggatgccgtgggggccgaatcccgggccgtacggtgttcctcatatttggtggttcgccgtcgatcctgaaaccggaaaaaaagggacgggctcagacatgctggagtggctggagaatacagtgctccgcgacacattaaaagcgcctttcgtgtcactgggcacagcggataagcatccgtggctgatcggcatgtacgagcggaaaggctacgtccgtgcaggcgaaaaggacttaggaaaagggcacatcaccatttatttgaaaaaacaattgcaggattaacattttaataggaaaaggcgggatttcaatgaagaagaaaacatgggctttgctgctgtctgccgcacttttggcggtcttatcagcatgcggaaacggaaaagaaagcgaaggcggcgataacgtactgcatgtaggcgctacgggacaaagctatccgttcgcatataaagaaaacggcaagctgaccggctttgacgtggatgtcatggaagccgtcgcgaaaaaaatcaacatgaaactggactggaagctgcttgaattcagcggactgatgggagagctccagaccggcaaactcgacaccatctctaaccaggtcgctgtcacggacgaacgcaagaaaacgtataacttcacagaaccgtattcatatgcgggcactcaaatcatcgtcaaaaacgataacaaagacatcaaatcagtcaacgatctaaaaggaaaaacagtggcggccgttctgggctcaaaccacgcgaaaaaccttgagagcaaggacccggataaaaaaatcaacatgaaaacgtatgaaacacaagaaggcacgctgaaagacgtggcttacggacgggttgacgcttatgtaaacagccgcagcgtcctgatcgcccagatcaaaaagaccggtctgcctctgaaattagcaggagacccgattgtctatgaaaaagtcgctttcccgtttgcgaaagatgcggctcacgataaaatccgcaaaaaagtaaacaaagccattgaagacctgcgaaaagacggcacgctgaaaaagctgtctgaaaagtactttaaagaagatatcacaacagaagcaaagcattaagaaacggcggtgaaaatcgagaatgaacagcattgattggggatttatgttttcagcttttcccgcgttaatcgaagccttgccgatcacattactaatggccgtcgcagccatggtatttgccgtgatcggcggccttatattagcgcttatcacaaaaaatcgtgttcctgtgcttcaccagctgtcaaaggtgtatatttcatttttccggggcgtgccgacgctcgtccagcttttcttaatttattacggcctgcctcagctgtttcccggaatgagcaagatgacggcgttaactgcggcgattatcgggttaagcctgaagaatgccgcctacttggctgaaatcttccgcgcggcgctcaactcagtcgatgaggggcagcttgaagcctgtctgtctgtcggaatgacaaaatctcaggcgtacagacggatcattttcccgcaagccatcagaaacgcgcttcccgcgacgggaaatacgtttatcggtctgttaaaagaaacatcgctcgcctttacattaggagtgatggagatgttcgcccaaggaaaaatgtacgcatcaggcaacctcaaatattttgagacgtatttagccgtcgcggtcatgtactggattcttacgattatttacagtgtgctgcaggatctgctcgaacgggcgatcagcaagccttatcgcacataggaggaggctcaggatgatacaagtcagacatattcgaaaagcatttaaagaccttaccgtacttgacgggatcgaccttgagatcaaaagcggcgaagtcacggccatcatcggcccgtcaggctcgggaaaatcaacgctcctccgttgtttgaatctgctggagcgcccggatgacggcatcattgaaatcggtgatgcaaagctgaatgcagcgtcctattcgcgcaaagacgttcataagcttcgccagcagacggcgatggtgtttcagaattacaacctgttcaaaaacaaaaccgccctgcaaaatgtgacagaggcgctgatcaccgcgcaaaagaaaccgaaaaaagaagcggaacagatcggtatggatctgctgcggcaagtcggtttagaacacaaagcggacagctacccgattacgatgtcaggcgggcagcagcagcggatcgggattgcgcgtgccttggccgttgatcctcacgcgattttactggatgaaccgacttcggcccttgaccctgagcttgtagccggggtgctccaagtcatcaaatcaattgccgaaaaacagacaaccatgatcatcgtcacgcatgagatggcttttgctcgtgaagtggccgacaaggtcatatttatggcggacggacgcatcgttgaacagggcacgccggaagagctgtttgacaatccgcagaacgaacggacgaaaaaattcattaagcaagtgggagagcccgccgaacttgtctaagaagggaagaagaagaaatggcaaatgaaacgtatgaatcattaaacaaacgtttaatcaatatccgccgcgaccttcatgaacaccctgagctgtcaggcgaggaattcgaaacgacgaataaaatccgccgctggctggaggaagaaggaatcacggttcttgatatgccgaaacttcaaaccggagtgatcgctgaaatcaaaggagacaaaagcggccccgtcatcgccgtcagagcggacatcgacgcactgccgatcgaagagaaaacaaaccttccgtttgcttcgcgcaacagcggcgtgatgcacgcctgcggccatgatttccatacggcatctattctcggcacggcttttttattaaatgagagaaagcatgagctgaaaggaacggtgcggtttatttttcagcccgcggaagaaatcgccgccggagcaagacaggtcattgaagccggcgcgcttgacggtgtatcggcgatattcggcatgcataacaaacctgacctccccgtcggcacggtcggtctgaaagaaggcccgctgatggcgagtgtcgaccgctttgaaatcactgttaaaggaaaaggcggccacgccggaatccctgataacagcattgatccgattcaggcggcaggacagatcatcggcggcctgcaatcagttgtcagcagaaatatcagctcgctttataatgccgtcgtcagcatcacaagagttcaaggcggcagctcttggaatgtcatcccggaccatgttgaaatggaaggcaccgtccggacgtttcaaaaagaagcgcgggccgctgtgccgaaacatatgaagcgggttgccgaaggaatcgcggccggattcggggcagaggctgatttccgctggtatccttaccttccgtcagtgatgaacgacgcccgtttcatccaggcggcggaacaaacggctgaaagcctcgggcttcagaccgttcgggcagaacagtcgcccggcggtgaagactttgcattatatcaagaaaaaatccccggcttcttcgtctggatgggaacaaacggaacagaagaatggcaccatcccgccttcacactcgacgaaaaagcgctcccggcagcggctgagtttttcgcccggcttgccgtcaacgtattggagcagacggaatgaatacggaaaatctgacggccggacttgctcaggccgtcatgtcgtctgtgccggaaacatccgctgaagcgatgaaagaagcgcgcaaaggactgcttgattttacagcggcagcttttgcggggagacgggataaaggagttgaaaagctggtaaaactggccgaagaagaaggcggggtgccgatagcgccgcttatcggcagaaatcaaaaaaccacgccgtcccaatccgcgctcattaacggattcatcgcacatgcgcttgattttgacgatgttcattctgatgtaagaggacatccgagcgcagtcatcctcccggctttgattgcagccgcatcagccggccgtatagacaaaagccgttttctcggtgcttatgtgacgggaattgaagtgatggcgcggctcggcgagtcagctggaaggcatcattacgagaaaggctggcacaatacaggaacgttaggtgccattgcggccgcatgcgccgtcggattcgcggagaatctgaatcaaacccaattgcagaaagcaatcgggtttgcggctgcccgctccggaggcatgagagtgcaattcgggacagaaatgaagccgctccacgccggactggccgctcaagccggattgttcgccgtgcagcttgcaaaggccggtttcggcggctcagctcatgcgctcgacggggagaaaggttttttcggactgtacggcgatcttgaacgggcagaaaccctccttgtaaacaggtggggaaaaccttggcggattgtgggcccgggactttggtttaaggtttatccgttttgctcggcggctcatcatgcggcggacgccattctcaagctgaaggccgaacatggtctcactttcggccaaacggaacggatcgacgtgatttatccgccgggcggggacgctgcattgacagaacggcgtccgaaaacaggcgaagcgggaagattcagcgtggaatatgtgatcaccttagctttgtacggtaaggatttttcagttgaacatttcacatccgagccgattccggaatcccttcaaaaaggatttgagcggattcaccgcagctgcgatgaccaaattcagccggctgaaaacgccgttccgaagggccgttttacaattgtacgggtcacggcttccggcggtcatgtctatgaaacacgtatcgactgtccgaagggagcgccgggaaacggtctttctgaaaaagacattgaagacaaactccggctcgctttgccgggagaagagaaaaaggcggaagaattgatcaaagcagccggacaatcaaatatggaccgttatttacagctgatataaataaaaagagcgaggggatgcagccctcgctctttttacgttcacttctattgaatagggggatatagggtgcgcccctgtctgcgctggcaggggcgcggtatcaggaaacggccgagccgtttgcttttaccgtgaaacttcctcttgataagcggatgttgatatcagacactttggcaatttgttcgtcgtgcgtaaccatgatgacgcatttgccgtctttatgcgccaggtcctgaaagagccggacgatttcctttgacgtatcctcgtcgaggtttcccgtcggctcgtccgcgcaaatcagatcggtgtcacagcagaaagcccgcgcaattgaaacccgctgctgttgtccgccgcttaatgtcagcacccgctgacgggcctgctgttcggtgatgccgacttttttcagcatgctgagcgcgaacgcatctttgttgttctccttagagccggtaatctccatcgccgttgtgacattctggagcgccgtcatatacgggatcagatgataagattgaaagacgatagagacatgttgatttctgaatttggttaatccgattttggagatgtcttttccgttataaaggatgcttccctctttaggtgtgtcaaggccgcccgccagagacagaaacgttgttttccccgtcccggaggcgccgacaattgtataaaacttccctttttcaaagctgatcgttatatcctgaaacagcggctgtgatttatcttggtaccagtagccggtctgttgaaaggttaataggctcattatgctgcctcctcttattcctgcttggtcaggatcgttttagggtgaagccgcatgactgatacagacggcagtaatgtggcgatgacggcaattgcgacgccgatgccgccgagaatcagaaggtcattcagcgagacgtttacctgcattgtactgatgacatccgcgccggatgaatgctgaccgaacatgccgcctccccgcggcatttctcctccgccccagccgcttgtttgctgctgtgaatcatcggctgagctgacctgctgggaaagaagctgatttccgagctgattcgccacaaggctgcccgtgagggatgcgatcccgatggcaataacggcgacaaccagaatttccgttaagaattgtccgatgagcttccagcgcttttcgccgatcgccatcaagacacccatttcatacttgcgttccctgatcgacatcatcacgatcaacccgagaatgaccgcgcccgcgatggatacaaggtataccacgtttttagaaaatgacgcgacattttcaatcgggccgaccatttgctgatacacctgatcatttgtcgtcagcgcgtaggttttatcatctatagatgtttttttcgcagccgcaacgaatgagtcaatatatttggcatcatccatataataaacggctgagctgattttgtttttgttatcagacccttttaacgccgccgcggcagtgtaaggcgtatagattttattgtcaggatttaagaatgaaaaatgctgtgcctgatcgtctcctgatgatgttgttttatagattcccacaattttaagcttcgttttcacagaatcatccgctgctgaggaaacggtaatggagccgccgaccttcagcttgttttgatctgccagcgtttcattaatcacggcgacttttgcgtccgcatctgtttttgtgatggcgcgtccgtcagtgatttttgagctcccgcctgtgaaatcatcaagcaatgccgtagagagcacgccttcgatcgaaatatccgctgaaattatctgtcttccgccgccttgaaaacggccgtcgccggaactgttatcggctgattcgcctgagctttttatcgcatcaaagctttctgcatttgctgacgctgtcgtgaggaagttgtaatttttaacatgctgtaaagatgtaagcttcttggcatctgagacggaaatcggcgttgattcaaacgtcctcttttcaccgtctttttgctgctgcgccatttgcttttggcggtcagcctggagtgtgacgctcccgccgagctgctgccttgccagttcgcttgatttctttgccgctgactggatcgtaagaccggacaggacaaaaatgcaaatcactgaaaacacaaccagctgcaaaaatgtttttcccttttttgccttcatgctccaaaaggctctttttataaagttcatgtctgttcctccgtgtgggtgtcagatcttgtaaaaccggccttctttagcaccggccattcgatatgtatatagtaggagaaatgtatgaaaaaaatatgaacaaactatttccgggtgatgaaataaaaactaacaattgtgaaacccgaaaacacccgggtaaaatggtgctattataagaaaaagcgtgaagataagcggaggaaccaatgaagatattaatgatagaagacaatataagcgtatgcaccatgacggaaatgttcttttttaaagaaggatttgaagccgaatttgtccatgacggagtggaaggctatcagcggttcacggaagaggactgggatttggtcattctggacattatgcttccatccatggacggagtgacgatctgccggaaaataagagagacgagcagtgtgccgattattatgctgaccgcaaaggacacggagtctgatcaggtgatcgggtttgaaatgggggcggacgactatgtcaccaagccgttcagtccgctgacactagtagcgcggattaaagcggtgatcagaagataccgggcgacggggcaggccgtaaaaagcgacgacttgatcgaaacggcgtgtttttcaatcaataagaagacgcgggaagtgtttctgcacggaaaacctgtcgagaatctgacgccgaaggaattcgatctgctcttttatctcgcacaaaacccgcgccaggttttttcgagagagcagctgcttgagcaggtgtggggctatcaattttacggcgatgaacgtacggttgatgttcatattaaacggctgcgcaaaaaactgtccagtgaggaaaaaccgtttttatacacggtgtggggggtaggatacaaatttgatgaggattaaatacttatatcagctgctgttaagccatgtcagcattttgattttggcctttttcatcatcatttccctgttttcgcactttgtgaaagattttgcgtatcaaaataaagtggacgagctgtcttcttacgcgcagcagatcacaagtgagctgaacggccgcgatcttgatctgcgccgcctgtatccgtatcaggacatgttaaaaacgcgcgagaccaggtttattatttttgatgaacatcagcggccttacttttttcctgacgatatgccgccgcgcgagaagctgaaaagtaaagagtggcacatgctgaagcaagggaaaaccgttcagatcagagcggagatgaaccgttttaatacggaaggcttagaagtgtcgctcgtcgcaaagccgctttttatcaacgatcaatttaaaggcgcggtgctgctcgtgtctcccgtcagaggggtcgagcagatgatcagccaggtcaaccgctatatgatttacgcgatcatcagcacccttatcatcacgattctgctaagctggcttttatctaaatttcacgtcaagcggattcagacattgcgggatgcgaccggaaaagtggcatccggtgattacgatatttcgctcaagaacagcggcggcgatgaaatcggcatgctggcgtccgatttcaacatcatggccaaaaatctgaagcaatcgagagagcagattgaccgccttgaaaaacggaggcgccaatttatcgccgatgtctcccatgagctgagaacgcctttgacgaccattaacggacttgtggaggggcttaacagcaacaccatcccggaaaaagataaagagaaatgcttctcgctgatcagcgaagaaacgaagcggatgctcaggctcgtgaaagaaaacctggattatgaaaaaatcagatcccagcaaatcaaactggacaagctcagtctgccgctcatcgaggtgtttgaaattattaaagagcatctcaatcagcaggcggaggaaaaacaaaatcagctgcggattcaagtggaggacggcgtcaaagtgttcgcagattatgacaggctgatccagattctcgtcaacatcacgaaaaacagcattcaatttacgcaaaagggagacatcacgctgcgcgggtatgaaggctataaagaaacggtgattgaaatcgaagacaccgggatcggcatctccaaaaaggaaattgagcatatatgggagcggttttataaggcggacgtgtcccggacgaatacggcatacggcgaatacggactcggcctttccattgtcaggcagctcgtcgaaatgcacaaaggcacgatagatattgacagcgaaaaagggaaaggcacgacctttacaatccgccttccgctgaatacgaaacatgaatcatcttgaaagcggcggtcccgtctggccgccgtctgttttaactccactcggaaaattgcgctctgccgaaacaaagtttgcgtgtttttcgggatggaaagagacggaaacgtgataaaataactggtaaacaggtcttggatggggagggtgaaggaatgaagagcgggttaattccttcttcagcagtcgggcagaaaattaacgagtggtatcgatacatcagaacattcagcgtgccggatgcggagatcttgaaggccgagatcaaacaagagcttgaccatatggagcctgattcgaacttagtgctttattattccctcatggaatttcgccatcagctgatgctggactacttggagccgctggaaaaactgaagatagaagaccagccgaccctgtcggaaattcttgataacattgataacagccaggccggcctcaaagggcttctcgattattacgtcaactttttcaaaggcatgtttgaatttgataaaagagaatttatctcagcgattacatattataaacaagctgagaaaaaactggccttcgtatcggaccacgtggaacgggcggagttttattttaaagtggccgaagcttattatcatatgaaacaaacgtatttttctttgatacatataaaaaacgcttatgaaatttacgtagagcaggacacatataacgtccggatcattcaatgccattttgtattcggcgtcaatttaatggatgaaaggcgctttgaacaggcggccaaacattttcagcacgctctgcaaatggccgaaaaagaacaaaaagcgcagcttgtcgggagggcgctgtataacctcggactgtgctactacaatcaggaccgcatcggcgaagcgattccgtactttgaacgggcggtcgatacatttgaatcacaaagaatcgtcaattctcttcctcaagcatattttctaatcacactcatttactttaaactcggaaaaaaagaaaaagcgtcggaatatcacaagcggggatatgaatatgctaaagaaacagacgatcccgtttatacggtaaaattcgaatggctgcaggctctgtatcaggcgaaaccggatgaggaaacaatcagcgcgtgtttccgttacctggaagataaaaatttatacgccgatatagaggatttagcactagaagcagctaaatattactatgaacaaaattgctttaaaatttcttctgactattttctgaaagtcgaagaggcaaggaaacaaatacaaaggagtgagggtttgtatgaaattgaaatctaaatggtttgttatttgtttagcagccgccgcgatttttacagtgacaggtgcaggccagacagatcaggctgaattccatgtagctgaaagaggaatgacgtgagaagaaaataacctgaacaaaggaaaagactgcccgagaatgttctcggcagtcttttttgcgcggccggacttggacagcggcggaaaacaaaagaaaacgccgcaggtcaaaacccgcagcgtcctcatatagacggagtgatgtttagaaaccgccaacgaaggcagtacctacaataatcaacaggataaataaaacaacgatcaaagcgaaagagctgactccagaatatcctgacatgagcttcacctccatattgtctataccatacaatatgtaaaagaagctgctttgtaagggatattagtggacaagagaaaaaagaggcggtgtcctatgagagtaagactccggcgaaaaattcgtcatacagcgcacgcaccgcgtgtttttcctgttcttctttcactccgaacatcatgctgacttccgatgacccttgattgatcatctcgatgttgacaccggcttccgacagggctttggatgccctggcggttgtgccgacattatggcgcatcgcttccccgacgaccataatcagcgccagattgtgcctgactgtgacttcatctgcttgaagttcctgcttcaggcgggtgacgagcctgtgttccagttctgagtccatctgattgtgccgaaggatgatcgtgatgtcgtcaatgccggatggaacgtgttcatacgtcaatccttcttcctccaaaatgtgaagggctttgcggccgaaaccgatttcccggttcattaaatatttgcttatgtaaatgctgcaaaagcccgtgtcgcttgcgatgccgatgactggcccgttcgtattgtcacggctgctgacgacgcgtgttcctttcgcatccggattattcgtattcttaatctgaacggggatgccggcccgaaatgcgggaatcagcgcttcatcatgaaaaacggaaaatccggcataggagagctcacgcatttcccgatacgtcagttcgttaatttctttcggatgccgcacgattgacgggttgacggaatagacggcgtccacatcagtaaagttttcgtacaggtcggcttttaagccgctggcgagaatggagccggtaatatcagaaccgctccgggaaaacgtcacaatctcatgctccttcgtgtaaccgaaaaatcccggaaaaatgatcaagccttcccggtttctcagacggtacaaatgatcataagactcagggagcacctgcgcgcttccgggttcattcgtcacaaacagccccgcttctttcggacttacgtattccgctttcacgccctgccgtcggaagtaggctgcgatcagcttcgcgttgttgtcctcgccgctcgccttcaccgcatccatatattgttcggaattggttttacagctgtttaagagatcgaataggtcactgcggattctttctataatagagaaatccaggttcagctcacgcgcgatggcggcgtaccgttcaatgaccgtttcggcaagctcgggcgctgcacctttttgcaaataatgctccgcacagcggattaacagatccgtcacctttgtatcgtccgagaagcgttttcccggtgccgatacgacgacggctttccgcgcgggatcagccgtcacgatttgaaacactttctcaagctgggctcctgacgcaagagagctgcctccgaattttacaactttcatgatttacatcccctaatatttaaattttctcacaaatttaatttttattatctctctttcaaacatgtaaatcaaggattttttctacgtgggaagaacatttgtattttcacggaggaaatttgccgctgtttgtcagatttgtttccctcaagcgtgtcatcatgtgcaaaaaatgataagcagccaaatgtaggttatagaaaatcctgcaaattcttgatagactgattgtaagacaatttagtgtacggcccgcggatgaccgcttttgaaagcaaaactgtattgactgcgcttggaaagatgataagattataattgtcgttgataatgataatcattacgagtgggatatatgggagttgtttggcaatcagtcataccgtttgtgatgggtgcagggaggcagcatgaagctacgttacttacttttgctactggcggttttggcgtgtacttctatatttatcggtgtagaagatttgtcgccgctggatatttttcatttaaataaagaacaggcaggtacattgtttgacagccggctgccgcgtttggtgagcattatcatcgccggcatgagcctgagcatctgcggattaatcatgcagcagatcagccggaataaatttgtatcgccgacgactgcgggaacgatggactgggcaaggctcggaattttgatttcattaatgctttttacgtcagcgagtccgcttgtgaaaatgtctatcgctttcgttttcgcgttggcggggaatttccttttcatgaaaatcctcgagagaatcaagttcaatgatgcgatttttattcctctcgtcggtttaatgcttgggaatattgtcagctcaatcgccacgtttatcgcatataaatacgatctgatccaaaacctgtcgtcttggctgcagggagatttctcactggtcgtcaaaggccggtatgagcttttatatctgagtatcccgctggtgatcatcgcttatgtgtatgcggataaatttacggtggcgggaatgggagagagcttttccgtcaatctcggcctgaaatacaaacgcgtcgttaatatcggtctgattatcgtgtcgctcatcgcttcactggtgatcctgaccgtcgggatgctgccgtttctcgggttgatcattcccaatatggtgtcgatttacaaaggggacaacttgaggagcagcctgcctcacaccgctctgctgggcgctgtttttgtgctgttttgcgacattttgggaagggtgatcatcttcccgtacgaaatttccatcggcctgatggtcggtgttatcggcagcggcatcttcctgtatatgctgttaaggagaaaagcatatgagtcataataaaaaaattacgctgctggcggcgctcgccatgatatgtatcggattcttcctgttctacggactgggcaattgggaatactccctgccgagacgatgcttcaaagtgcttgccatgatgctcaccggaggagcgatcgcgttttcgacggtcatcttccagacgattacaaataaccgcatactgacaccgggcattttaggcctcgattccctgtatatgctcattcagaccgtcatcgtgttcctgttcggttcaatgaatatcgtcatgatgaacaaaaatcttaatttcgtcatctccgtcgggctgatggtgctcttgtcactcgttttgtatcagctcatgtttaaaggcgaggggcggaacgtgtttttccttctgcttgtcggcgtcgtgttcggcacgctgttcaacagtctgtcatcctttatgcagatgctgattgatccgaatgagttccaggttgttcaggacaaaatgtttgccagctttaacaatatcaacaccgatcttttatggtttgccggtgctgtctttcttctgacgggcatttatgtctggcggttcacgcggttttttgacgtgctgtcgctcggcagggagcacgccgtcaacctggggattgattacgataagcttgtgaagcagatgctcattgtcgtcgccattcttgtgtctgtctctacggctcttgtcgggccgattatgtttttaggactgcttgtcgtcaatctggcgagagagtttttaaaaacctacaggcacacgtatttaatcgcgggttctgtcctgatcagcatcgtcgcgctcgtcggaggccagttcgtcgtggagaaagtgttcacattttccacgacgctgagcgtcatcattaattttgccggcgggatttattttatctatctgctgttaaaggagaataaatcatggtagaggtcaaaaatgtaagcaaacaatacggagggaaaaccgtccttgagaaaacgtctctatccattcaaaagggcaggctcacctcatttatcggtccgaacggcgcgggaaaaagcacgctgctgtctatcatgagccggctgattaagacggattccggggaaatcacggtcgacgggcaagagatcggggcctgcaaaagcaatgatctggcaaaaaaaatcagcatcctgaagcagacgaaccaaatcaatatcaggctgacgattaaagacctggtcagcttcggcagatttccgtattcccaggggaaactgacggatgaagattgggtgcatatcaaccaggcactcagttatatgaagctggatgacttaaaggataaatatctcgatcagctcagcgggggccagtgtcagagggcgtttatcgcgatgatcatcgctcaggatacggactatatttttctcgatgagccgctgaacaatttagatatgaagcattccgttgaaatgatgaagctgttgaagcggcttgtggaagacttcggaaaaacggtcgtcgtagtgattcacgatatcaacttcgcatccgtatattcagaccatatcgttgcactgaaaaacggccggatcgtcaaagaagggccggcggaggagatcattgaaacctccgtgcttgaagatatttatgatatgaccatcccgattcaagagattgacagtcagcggatcggtgtgtacttttcttaaaaaccagatgaggtgaaaatcatgaaaaaattcgcattgctattcattgcgctcgttacgatttttgttgtttctgcatgcggaaacggggacaaaacatcaggcaaatcaaaagaaacaatcacaatcaaagatgacctgaacaaagaaggcgtcaaagtgccgaagaatccgaaaaaagtcgtcgtattcaacttcggaatgctggacacgatggatgaactcggtttacaggatcacgtggcggggcttccgaaacaaaacattccaaaatacttatcttcatataaaagtgataaatacaccaatacaggcggtttaaaagaaccggattttgaaaaagtcgcggatattgacccggatttaatcattatcgctcacagacaatctgattcttataaagagttctcaaaaatcgcgccgacgatttaccttgatgatgactatacaaactacgttgacagattcaagcacaacaccgaagtgatcggcaaaatctttaacaaagaaaatgaagtgaaagataagcttgcgaaaattgacaaatccattgcggatctgaagaaaaagacaagcagcacggataaaaacgggttagtggtgatggcgaacgacggcaaaatcagcgcgttcggatctaaatcaagatacggcttcattcatgatgtgttcggcgtcaaaccggctgacaaaaacatcgaagcctcattgcacggacaaagcatttcttatgaatatatcgccaaaacaaaccctgattatatgtttgtcgttgaccgcggaacagcgatcggcacaaaatcttcaacaaaacaagtggttgaaaatgattatgtaaaatcggtgaaagccgtgaaaaacaaccatgttgtctaccttgattcagctacatggtatttatcaggaggcggcctggaatccatggcgcaaatggtgaaagaagttaaagacggaatcgagaagtaaaaaaagaacccggtcacatacgtgatcgggttctttttggtttaccgcgtaacggcctgctgctgctcgggctgacgcggttttttcttcaatataaaagataggaggaagccggccagcgcgatgcaggcggctacgacaaatgccgcattcatgccgtgcagggcggcgtttgccggagttgtcgcatttgcgtgcgcggcctggctgctcatcacggaaactagcagcgccgtaccgatagaaccgccgacttggcggacggtattgttcatggctgtgccgtgcggaattaagtggcgcggcagggcgttgatacccgctgtcgtcaccggcatcataatcatggctgttcccaaaagccgcgcggtataaacgacgacaatccaaatgagagacgtcgagtccgtcagattcataaacggcagggacgtgagcaggatgatgaagaatccggtcatcgcaaggccctttccgccgattttgtcaaacacccggccgataaacggagacatcatccccatcacaatcgcgcccggcaaaagcattaatccggtatcaaacgcggatacgccccggactttttgcgtgtaaagcgggagaatggtttccgttccgatcagcagcgcgaaaacaagcgttccgagcagggtggtcaggctgaaaatcccgaaagaaaacacgcggaattccagcatcggttttttgagcttcatctgtcttgcgataaagaaaatcagcgcgaccgctccgacaagcagcgaagtcagcacttcagtactggtccaccctgatgaaccggcgcttgagaagccgtaaagcagaccgccgaatccgagggtcgataagatcacggatacaatatcaatctgtgtttctcgtaatgtcgtgacgtttttcatcagaataatcgctaaaagcaaatcgatgactgcgatcgggaagatgatataaaacaaagaccgccaagagaatgcttcgaccgcccatccggaaagcgtcgggccgatcgccggggcgaacgaaataaccaagccgaccatacccatggcgcggccgcgcttttccatcgggaaaatcgtgagaaataccgtctgcatgagcggcagcataattccggcaccggctgcctggataatccgggccgtcaagagcaccggaaagttcggggcaaatgcgccgacaatggtgcccgccgtgaaaatactcatggcggaaatcaagagggtgcggcttgtgaatttctctattaaaaatgcggtaatcggaatcaaaatcccattcgtcagcataaacgatgttgtcagccattgcgctttgttggcgtctatattgaagtcattcataatgtgcggcagcgccgtgataagcagtgtctggttcaaaatggcgacgaacgcacccgccaaaagaatcccgacaatgacagagcggttgtatggtgcagttttaatactcttattcaagctgattccttctttctttatagtttgagcaatgttttaacggctgcaagcggctggtgcagcggtccggcctgctccaaataaccgataagcgctttgatgagaaaatcccgcggctgtttgtccgctgattctttctccagcatagccgccgcggaagcgagtcctgcggcgtcatatttttcctccggaagggctgagacggcttctttcagttccttcaggctttcagccagcaatacggttttgtctttcggctcaaatgaggaagcggaggcgatataaaggtcaatcatctcctgaggcaaagcggtttcggctgtcctgttttcgacgatgagattgaggtggcggatgataaactccgtgagcggctccagggcgagcggttctttttccagcttaatcagcgtgatgcattctctcaggagcccttgcaggacgattaccagctcccatacataaggaataatgtcttcaccgtacgtctgaatcagtgaatcgcgatgccagcagataaaggtggagcgggccctgtgaatatgccgttttacccgttcattaatggaagaggggcttccgtacatcagcatattaaaaaactgctgattgcgcctgaagccttcaagctcagccatcagttttttggcaaaccgttcctcaggggagaggcttgtttcttcattcaataatgaagcggccgctaccatctgtttctggttaaagtcgagcagctccaacagcaggtcttcctttgattcaaacagcttatataaagatgctttggagactttgcactcctctgcgatcgcctgcatcgaaaccgacgaaaagcttttcccggaaaaaagctttcttgccgccagcagaatatccgttttcttatcattcataagcccagattccttctttcgtcacaatagaaaacccatcggttcacagaaaaccaatgagtatatgatgaaaatattaacaaaaatttttacatagtgtcaacgcttttgtttgagaaatagaaaaaacctgccggagtgttccggcaggctgatacgtttatttatccgtcttaaatccttgtttttcaagcatttcacgaatgtgaggataataaacctgcttatagtaggaagtgatgccttgtgaccagtttcttgtttcctgtccgtcggtgcgttttttcatgtattcggacatctgcttgtcataggcctcgatatgggttcttacatcttcttcttgatacgtttcatgatgcagaacggctgcttgcggcagacgcggttttttcgcggagcggtctgccggatggccgatgacgagaccggaaaccgggaaaacgtatttcggaagtttcagcaattcaatgagttcgtcaggcttgccgcgcacggcgccgatcggcacagtgccgagtcccattgattcagccgcagccgttgccgtacccagcgcaatcccgacatctacggctccgactagaacggactctaaaccgttcgtgatctcaagcggtgtatcattatattcttcaagcgcaattttggcgcggttaaaatcagcgcagaataaaaggaaaacaggcgcttggtcaatccacggctggccgccggccaattcggatatttttttcttccgctccttatctttcaccgcaataacggtaaattgctggccgttaatggaagtcggcgctgcctgagttgcttggatgataaggtccagctgctcatccgatacgggttcatctgtgtagctgcggatggaacggtggtctgttaatatttgaaggacttcgttcatgtcattcatcctttcgttactctgacagttctgtgcgaacgacgtcaagcggcgcactcagcacttcttttgcttttgccacgaatccttggaaatggtcagttgcgttgtggaatttcatcgcttcttcatctttccattgctcaagcataacgaatgtattttcctcaccgactttttcgaaaagatcgtattgcacatttccttcttccgcgcgtgaatgctgaacaagtgattgcgcttctcctaaaaattcctcgcgtttatccgcttttactttcatgtaagcctgtaagacgatcattgttattcctcctgattgggtttatttgttatagttcgaatattatcgaactaactgtaacatgtttcgctgcgaatggtaaaggaaaaaccctcaccgcctaaattgtcacccgccgatgatctgtgttacatttgactcatgaacattccaaaccatcctgaaaccgaacgcttacagctgacaaaggttcttcatgctctgagtgatccgctccgcttagagctggtcaaacaattggcggaaacaacagaaaaaacgtgcggaacctgcgctgatgtccgggtcgctaaatcaacgctgtcccatcacttcaaagtgctgcgggaagcggggatcgcccaagtgcgcatagacgggaagcaccgttattattccctgcgcaaagatgatttacaagcggcgtttcccggcctgctggaggcgattttgcagacagaaccggaccgctggtaaataagtccccgaattccgggggtttttttatgcgccgaaaaccgcccggtaaagcctgtagacgccttcttgaatatcgctctccttcaggcgtgcgaaccccaggataagctgcggcttatttgaatcgcctcccgctttcagacggaatcggctcatcgcaaacagatcgagctgttctgcatccgcccgtgccaatatctctttttctgaacgtgcgcattcaaactcagtgacaaaatgaagccccgcattggcgccctttacactgattctttctccgaatgtttcttccaaagccgaaatgaggcattcccgcatgttcttataatgctgcttcatctttttaatatgtttctgatattcacctgagtcgataaattctttaagcgcgagctgggcaagcgtgctgcacgtttgcaggtcatacgttctctctttgaacgtccgcaaaagcccgggcggcagaaccatatagctgatgcgcagacctgggaaaagggattttgaaaaggtccccatgtagatgacattttgaaaccggtcaaggctttgaagcgccggtatcgtatcggcgtcatatttaaattcactgtcataatcatcttcaatgatgaagcggccgttctgttcggcggcccagtttaaaagctgaatccgccgggaagcgggcatgatcacgcctgaggggaattgatgggaaggcgtggtgatcaatacagagggccggcgtttttcgatttcgtccatggacatgcctttttcatcaaggctgatcgtcgcaacctttttcccgaggttttgcagcagccggtacatcctcatatatcccgggttctccatggcgtagagcgcgtcttttggcagcagttccgtcagcagctgcatcagcatttgcgtgcccgctccgagcacgatttgttccgggcggcatgtaacgccccttgtcagggaaataagccgcgaaattgtttcacggacttcatataagccttgcggatggacgagttctccgagtgtatgaaatgaacgggcggctgctttctgctcacagcggaaccagcttttcagggggaaatgcgccgtatccacactcatatgagaaaacgaaatccagccgctcttatccgtctcccgctctttcaaatcatcaggcaataggagcgaaggcgtttcttcatgataaaccgtatcaatttcctccacgaaaaagccttttctttcgaccgcatataaataaccttccgaaagcagctgctgataagctgaattcactgaattcacgctgaccttcagcgtctcggcaagctcccgtttagacggcacctttgtatgaggcatcaggctgcgctttaaaacggccgcttttatgtgctgatagatctgctgatagatataatccgccgtttccgaatggtcaatggaaatcgtcagcatccagaccctgcccctttctgataccatggataaattgattttggtacttttcatcataccaaaaagaagtcagaatgataagaaaacaatgcagggggatggaatctatgagtcgaacagcatcatcggaagtgacaactgcccagtggcagcaaaaacgggatcaattcgtttccaagggggtcggcaacggaaaccgcagcatggcggtaaaaggggaaggggcgcttttgtacgatttggacggcagacgattcattgattttgccggagcgatcggaacgctgaatgtcggccattcccatccgaaagtggtggaggccgtgaagaaacaggcggaggatctgattcacccgggatttaacgtcatgatgtatccgtcttatattgagctggccgaaaaactttgcgcccttgcgccgggagatcatgcgaaaaaagcgatttttctcaattcgggggcggaagcggtggaaaacgccgtgaaaatcgccagaaaatatacgaagcgccaggctgtcgtgtcatttacaagagggttccacggccgcacgaacatgacgatgagcatgacgagcaaggtgaagccttataaattcggtttcggcccgtttgcctcagaggtgtatcaggcgccgtttccttattattatcaaaagccggccggcatgagcgacgagcagtatgacgactttatcatcagcgcttttgaggatttctttatcgccgcagttgcaccggaaaccgtcgcctgtgtcgtcatggagccggttcagggagaaggcggcttcatcattccgtcaaaacgtttcgtgcagcacgtcgccgctttttgtaaaaaacacggcatcgtttttgtagcggatgagattcagaccggttttgccagaacgggaacgtattttgcgattgaacatttcggggccgttcctgatttgatcaccgtttccaaatcacttgcggccggattgccgctgagcggcgtcatcggccgggcggaaatgcttgatgccgccgcgccaggggaactcgggggcacatatgcgggaagcccgctcggctgtgcggctgcgcttgcggtcttggatattattgaagaagaagggctgaatcagcgttccgaggagatcggccggatcattgagcatcaagcgcttgagtggaaaaaagagcatgcctgcatcggagaagtgcgcagactcggcgcgatggcggccatcgaaattgtcaaagatccggacacgcgggaaccggacaaagcaaaagccgcggcgatcgccaaaacggcgaacgagaacggactgctgctgctgacggccggcattaacggcaacattatcagattcctgacgccgcttgtcgtgacggatgagcagctcaaagaaggcctttccattatcgaagcagctctgtgagttcaattattggaatgccggcggatgtgtctgctatcatgaaagtgtgagatacatcaactagcattcaatggctttactatagcagagaaaggaatgttcaatatgccagaacaattaacagtgtacaatccggcaacgggagaggcgatcgaaagcatcccccagcagacggccgaagatgttgaaaaagcgattgaacgttcacatcaagcgtttcaatcatggtccaaaacatcagcgggagaacgtgcctcacttttgagaaaatggtatgagctgattgttgaaaataaagaagaacttgcggaattaattacgaaagaaaacggcaaaccgtacgaagaagcggtcggagaagttttatacggcgccggctatattgaatggttcgccgaagaagcaaaacggatttacggcagaacagtacctgcgccgacaacgggcaaacggattgtcgtcacccttcaggcggtcggcccggtagccgcgatcacgccgtggaatttcccgaatgcgatgattacaagaaaagccgcgcccgctttggcggcaggctgtacgttcatcatcaaaccggcggaggatacgccgctttccgcttacgcccttgcgcgtctcgcatatgaagcgggaattccgaaggacgtgctgcaagtggtgatcggtgacggagcggaaatcggaaacgtcttcaccagcagcccgaaaatccgcaaaattacctttaccggctcaacgcctgtcggcaaaatcctgatgaaaaacagcgccgacaccgtaaaacatatgtcaatggagcttggcggacacgcgccgctgatcgtggatgaagacgctgatcttgatctggcggtagcccaaacaatggcctctaaattcagaaatgccggccaaacctgcgtctgtgcgaaccggctgatcgtacacgaatccgtaaaagacgagtttgcgaaaaaactgagtgaagaagctgcgaaactcaaagtcggaaacggtcttgaaaaaggcgtaaacgtcggccctgtcatcaacaaaaaaggcttcgataaaatcgtcggccaaattaatgacgccgtggaaaaaggcgcaaaagtgctgacgggcggaacgtatgaccaaaacgatgaaaaaggatgctatttcgtgacaccgaccgtgctgtcaaatgtagatacatccatgaacatcatgcatgaagaaacattcggcccggttgcgccgatcgttacgttctcagatattgatgaagcgatcaagcttgcgaacgatacgccgttcgggcttgcggcttatttcttcacagaaaactaccgccgcggcatctatatttctgaacagcttgaatacggcatcatcggctggaatgacggcggtccgtccgcggttcaagcgccgttcggaggaatgaaagaaagcggcatcggccgtgaaggcggtacggaaggcattgagccgtacctggaaaccaaatacatgtctatcggactttaatgagccgaaaagtaagccccgcttctaagcggggctgtttttattgagcagtctgccggtgaatatcgccggcaggcttttttgatcttgcgggaataatcggttcgattccagacaaaataacagcaaatacgattgaaagaaggtcgccatcatggatatattactggctcttctcccggctttattttgggggagcatcgtgttatttaacgtcaaattaggcggcgggccttacagccagacgctgggaacgacaatcggggcgctcatcgtttcgtttgtgttgtatctgtttgtccacccggtgctgtctgggcgcatttttattgtcggcatcatctcggggctgttttggtcgctcggccaaagcaatcagcttaaaagcatacagctgatgggcgtttcaaaaacgatgccgatatcaacgggaatgcagctcgtctcgacttctttgttcggtgtgatcgtattcaaagaatggtcaaccccgatcgcgattacgctgggtattctcgcccttatttttatcatcatcgggattgtgctcacatctttagaagataaaaaggggcgggcggacggagaaccgggaaacttaaaaaaaggcattgtcatcctgctgatctccacgctcggttatttggtctatgtcgttgtggcccggctgttcggcgtatccggatggtcagcgctcctgccgcaggcgatcgggatggtcatcggcggactgctcctgacgtacaagcataaaccgtttaataagtacgccctcaagaacattctgccgggaatcatctgggcgctcgggaatatgtttctgttcatctcacagccgcgcgtcggagttgcgacaagtttttccctctctcaaatggggatcgtcatcagcacgctcggcggaatcttcattctccgtgagagcaaaacgaagcgtcagctggtcgccattgccatcgggattatcctgatcattgtggccgcggtattcttaggcgttgcgaaatcaaattcataacaaatgcaggaggtttgaacatgtacacggatttaaaaggaaaagtcgttgccattacgggagcttcatcaggattaggaaaagcgatggcgatccgcttcggacaggagcaggcgaaagtcgtggttaactactatagtaatgaaaaagacgcccaaaccgttaaagaagagattcaaaaagcgggaggcgaagcggtcatcattcaaggcgacgtcacaaaagaagaagatgtcaaaaacatcgtgcagaccgcggtgaaggaattcggcacattggatgtcatgatcaataacgccggtatggaaaacccggttcagtcgcatgaaatgccgctcaaagactggaacaaagtcatcaataccaatctgaccggcgctttcttaggaagccgcgaagccattaaatattacgtagagaatgatattcaaggaaacgtcattaacatgtcaagcgtacatgaaatgattccatggcctctgtttgttcactacgcggcgagtaaaggcggcatcaaattgatgacggaaacgctggcgctggagtacgcgccgaagcgcatccgtgtcaacaacatcgggccgggagccatcaatacgccgatcaacgcggaaaaatttgcggatcccgttcagaaaaaagatgtggaaagcatgattccgatgggatatatcggtgagccggaagaaatcgcggctgtcgccgtctggcttgcttcaaaggaatcaagctacgtaaccggcattacgctgtttgctgacgggggaatgaccaaatatccgtcattccaggcaggccgcggataagaaaaaaagcgatcgcaggctctttagagccggatcgctttttgcttacgcgcgttttttctttacaagcgccgcgatggaaaggataatcgccgcagctgacagaacgatggctgcaatatcaagcgctgatacgccggatttgctttcttcgtttgactgttcagctccgtgcgcatccgtcacgctggccgatttcgtgattttcgtaatcgagtgaggcgtgtcggctttctcatcacccgtccattctacaatgctgccgtctttgtaatattggtaagcgtcccaagcggcatctccgctcttttcaggatttttcgcaacgaacgtgaactgctggaattggccgggctgaatgccgccgtcctttgcttcccaagtgacggagaccgctttgtcatcatgtttggatacggatgttttccagcccggaatcggctgatactgctgaaattcaacgccggcgggcattttcagcacgactttcgttgtcggctcattcttttctacaggcactttcatcgtgtaggtttcccaggaaccggccgcggattccgcgggtttgactgagacgtgggcgcttgctgtcgccgtaaaaccgacgagtgacagggtcacggcggatatgaataataaagccttttttttcaacatgagatacactccttagtttgtcgttgagaatatttggttgatttcattaaaatcgtttgtcagcccgtggactttgatcttccagtttcccttttcggtgatggacaggttggcggcttcgaatgtgccttccttcgtcttcttcaaatcaaaggtgctttcatgctgtttgccgctgaagcccgtctggtaaacagtgaccgtaaattgctgaatgtcttttaccaagctgccgttatgatcggtgacaatgacttgaaattcatttttacccggctggttcggcgtaatgtgcaaggacagggtttccccgtttccgatcgtttctgagccgttaaaaggcaatggcgcaggcggcggcgggctgggcaggcttgtgaagacggcggttgtaaataacaccgcaatgcctagtgcccattcggcctttatcgttgcgctgatgctcctttttctgctgaacttcgtcatccatacgtgaacggcgccgagcacaagcatgatgacaaacagtccgattttcaaaaggagcgtcttaccgtaagcggtgtgaaagagtgaatcaaacgtgcggataatgaaaaatccgttcagcacacctgaaaataacagcacaccgacagaggcgaacgcccaaggagaaaaccgtctgaccgtttcccaagcgatggttttatcgggttttctccactctgatgaaagaagcagcacaagcgcggcgataccgcccatccatacagacgcggccgataaatggagaaagtccatcgcgatgccgaccgctttttcgtcgataaccgccgcatgcccggcgaatgcttttgccaaaagcgaagcgaagaagaacaacagcggcgccgtccagtacgcaaatgaccggaatgctttcttcttcaacagcgggatcatggacagggcgagcaggataaataagctgatctggatcatccagacgtacccgcctgccgttttcagaagcgtttcttttacatagtccggctggaacgcggcgctccaagcgccgcccgcgttttctttcgtctggatcgggagctggcagataagcgcgagccccgttacacataaagaaatcacgagcagctttacagttcgttttgcttttgatgaatctttattatttctgtaccaaaacagatggaaaaaagccgtgccgataaacagggagagagcggtgtacaaaataccgcggtcgatggccgcttcgggatgaagcgccgcttgcgatgatgtctgctcctgaagttctccgccggcttttccgatactgaaagggatgacgccggataccggatgtccgtcggccgataccgcgttccattccgctctgtaaatatcatgcggcagattttttttcaatgccgcggtcatgatgcgggcatcatttttttgaatcactgttttgcccgcgtcgacccgttcgccggatgaattatagaccttaatggagtggaagccttcttcaatctgttcattaaactcaatttcaatctgcttcggcgcttgttttaattcactgttctcacccggatttgagtttgtgatgtaggcgtgggcgaagcttgttttcggaatcaaaacaaggaacagcaaaaagatgagccagcgtttgttctgtctcatggatgatgacaccgccttccggttggttgttgttatgtcttgctgcaggtgcatcccttctgcctgtcgtgtaagatgatgtccgccgcctcgtcaaaggtgcaaatgatcccgccgaatcctttttgaaaccgttctgcgtaatcaagcgttgagaagggaatcgcctgaggccggcagcagtgaaggtcaatatcggcatggactaaaaagtatgcggaagctgccgtcagtgtcgtctgaagaagaaaatctttacaaatgacgtgggacacttcttcctttttatcctcataccgcaaaatcgcgcaatgaatgcagcacatctgctcaacggcttgtgaaacggtaataagctgaacagaatacgaatgctgaatcggccgcaggcaatagccgcattgattggcgcttcgttctgaagcgggagggagcgtaatgccgccgggtgtccggataatccggtttgcatccgccagctgattgacgtctctgtacacggtcatctcggagacgccgaatctctcgcttatgtcagagattttcagcgcgccctcttctttcagccattcaagcaaggtttgctgtctgtgaatcggaagcaattctgcatcctcctttttatgcgaatgagtgatgaacctccctctaagagtagatgttttcacaaatgcacacaagagcctgatgataaaatatgtgaaaaaatgttgaacaatcacaaatgtaaaagacgtagtcagactctgttataatagaagagttgaatggaggaataaacatgaaagaaacgacctgcccgaactgcggcaagccgattacaggcgacatggtcagatcatccatgatcccgtgccagtttcagtgcgggcattgccatgtgaaattgcgtgaatataaagtatcagctccgattatggctgcggccattgcgatcacggtgcttttgatttatcttgtgcagatggccagaaccgccgtcatgccgatgtttccggcagcgcggtatgtgccggccgccattttcgcgctcgtatgtgcgtatccggtgtttattgtcagtgagcggctcattgccaaactcgttgtcacaaaaggacacattatatacagaaagcggtaagacacctttgatgaggtgtcttttttttgttaaggagttgtcacagtctctgtgccaaactcctctttacttttcattgaatgagaattgtaagcgttttatgatgaagacacaggggagagaaaccccgtgtcttatttattttcatctgaaggcaagcaaacagggagggaatgaacatgcagcaagaacagcaagctggcatgaaagtgaagatacagcggttcggcagttatttaagcggtatgatcatgccgaatatcggcgcatttatcgcatggggaattatcaccgcgctgtttattccagcgggatggtttccgaatccgcagctgaatacattggtaaccccgatgattacgtatcttctgccgcttttaatcgcatatacgggcggaaaaatgatttacgatcaccgcgggggagtcgtcggagcgacggcggccatcggagtcattgtcggagcggacattccgatgttcttaggggcaatgattatggggcctttgggcggttatctcattaaacaattagaccgtgtgtttaaagataaagtcagacaggggtttgaaatgctgatcaacaacttcacggcgggaattatcggagctgtgctcacgattatcgcgttttatgcgatcggcccggtcgtcctgtctcttaacaaattgctggcggcgggtgtggaagtcattgtccacgcgaatttgctgccgattgcaagcgttttcgtagaaccggcgaaagtcctgttcctgaataacgcgatcaaccacggcattttaagtccgatcggaatcgagcaggccgccaaagcgggtaaatccattctgttcttagtggaagcgaaccccgggccgggactcggtattttactggcatatatgttctttgggaaaggctcttcaagatcgacggccccgggagcggcgatcattcatttcttcggggggattcatgaaatctatttcccttacattttaatgaaaccgatgctgatcctcgcggcgatcgccgggggagcgagcggactgcttacattctcgatctttaacgcgggtcttgtcgccgcatcatctccgggaagcatcatcgccattttagcgctgacgccgaaaggaagctacctcggcgtgctggcgggcgtcatcgttgccgcggccgtatcgtttatcgtttcggcgcttattctgaaatcgtctaaagcgggcgaagaagatttgacagccgcggcggaaaaaatgcaggaaatgaaaggcaggaaaagtgaagcggcgtccgcgttggcggacaaagaggaagagccggaaaacagcgccgctgatatttccgccgaccaagtcagccgcattatcttcgcgtgtgacgcgggtatgggatcgagcgcaatgggcgcctccattttaagaaataaagtgaaaaaagcagacctggatattgatgtgacaaatacgtcgatcaataatctgccgaatgacgcggatatcgtcattacgcataaggacctgactgaccgcgcgaaagcgaagctgccgcaggcggtgcacatttcggttgataatttcttgaacagcccgaaatacgatgaactgattgaaaagcttaaaaactaatcaaacagaaagagggattttcatcatggaagtattggctaaagcgaacatcaaactgaaccagacagtgaactcaaaggaggatgccatccgcctcgcgggacagacattgattgataacggctacgtgaagaacggctatgtggaaaaaatgttcgaacgtgaagaaacatcatccacgtttatggggaatttcatcgcgatcccgcacggcacggaagatgcgaaggatgaggtgcttcattcaggcatttccgtcatccagattccggacggtgtggaatacggtgaaggcaatacggcaaaggtcgttttcggtatcgccggaaaaaacaatgaacacttagacatcctgtcaaacatcgccatcatctgctcagaggaagaaaacatcgaacggctgatcagtgcaaagacggaagaagaactggccgctattttcagcgaggtgaactgacatgattgcccttcatttcggagcgggaaacatcgggcggggctttatcggcgccctgctccatcattccggctatgacgtagttttcgctgatgtgaatgaaacgatggtcagccttctcaatgaaaagaaggaatataccgtggagcttgccgacggcggccggcagaccgaaatcatcggccccgtttcagccatcaacagcgcggtgcaagaacaagagctgtacaggctgatcaatgaagcggcgatcattacgacggcggtgggcccgaacgttctcagactcatcgccccgtccatcgcggaagggctgaagcgcagaacgtcctctgagcctctcaatatcattgcctgtgaaaatatgatcggcggcagcagttttctgaaaaaagcagttttcggacatttgacggaagcggagcgggaactcgtgaaccggacggtcggcttcccggattctgcggtggatcggatcgtgccgattcagcaccatgaagatccgctgaaagtatctgtagaaccgttttttgaatgggtcatagacagaaccggctttgccggcggccagccggtactggaaggcgcgttgtttacggatgatcttacacctttcatcgagagaaagctgtttaccgtcaataccggtcatgccgttacggcgtacgtcggctatcagcgcggattaaaaaccgtcaaagaggccatcggccatccggaaatccggcgtgtcgtgtacgatgcactttcagaaacgggcgagtacttagtgaaagcgtacggctttaagcaagccgaacacgagcagtacatgaagaaaatcatcggccgctttgaaaatgaatacatcacggatgatgtgacgagggttgccagatcaccgctcagaaaactcggagcgaatgacagattagtagggccggccaaaaaaataaaagaaccgaacgcgctggcagaaggcatcgccgccgccttgcgttttgactatcaggatgatccggaagcggttgagctgcaaaagcttatcgcggaaaaaggcacgagcggcgttcttcaagacatttgcggtattcagccgcatgagccgctgcacggcatcgtgctcaaaaagctcaatcaataaaaatgaacccgcgtcgggggacgcgggttttttcttgcgttataatgagagagaagggaggctgcgtgatgaatcagaagctattgccccatcgttttccgtttcttttgattgacggcacgacgaacagtgaagccggaaaatgggcggctgcttacaaaaacatcagtgaaaatgactggtttataactgaatcccaaagagagatgccattttcgctcgtcgttgaagcaatggcccaaacggcggcttgcgcgggaattaccggtggcgacggcctcggtctcttatccgcggtgaagaaagcggaaaggttaggtgccgctttgccgggagaccgtctggatcttttttttgaggtcacgcgaatcagacgcggttttgtgttcggccgggcgaaagcgtccgttgctgggaagcctgtggcggaagctgagctcagcatatttatccagccatcgtaaaaaaagccgcctccagcggcggctttcggacaagcctgttattttgtatcataatctctttcactttgtgaattgtccctttggtcatgtttgtgtttttcgtcattggcgttttccttcagctcttccagcggaatcggatcggttaaatcatgatgttcaggattttcattcggtttgttcttttgttttctttctttcatcctccatcacctcaatatttcttttcctcaacgttctccccgccaaacgcaggaagcggttttttgttcctgtgggtcatatgtattaaaatagagacgactacattataaaaagtgaggtacatatatgccgatacaaagagaagacgcagatattaaactgatcgcgattgatatggacggaaccctgctcaatgacgagcagctcatcccggaagaaaaccggcgggcgatcaaggaggcggaggcgaaaggaattcacgtcgtcatcagcacaggacgcacgctgatgacctgccgcgaactggctgagtctctcgagctgtcatcctttttaatcacggcaaacggcagcgaaatctgggattccgactttgagctggttgagcgcaagcttcttcataccgatcatattcaaaaattatgggatctgaggaataagcacaacacgaatttctgggcctctaccgtcgatagagtgtggagaggggaattcccggaaacgattacagatcatcagtggctcaagttcggattcgaaatcgaggatgacgaagtgcggaatgaggtgctgaaagagctcaaggaatacaaggagctcgagatcacaaactccagtccgatcaacatcgaagtcaatgccctcggtatcaacaaagcggctgcgctggcgaaggtatcggaaaaactcggcttcacgatggaaaatgtgatggccatgggtgacagtctgaatgacattgccatgattgaaaaagcgggtgtcggcgtcgccatggggaatgcgcaggacattgtgaaagaaacagctgactgggtgactgatgtcaacacggaaaacggggtcgccaaagcgatccgccactgggtgttataatagaaaaaagagagagtctcagtatgaggctctcttttttttgttttgtcagatttatgactaggtccatggtaggttttctgacaaaaggatgttcaaacctgtcagaattaaatataatgaagagaaatccaacaattcggaatagtcattccgaatagcggaatgataatcatataaaacgtttacaatacaggagggatcttatgtttcagattgacatcaattgtgatttaggagagagtttcggtgcttataaaatcgggctggatgaagagattttggattatgtgacatctgcaaacatcgcctgcggctttcatgcgggtgatcccagcgtgatgcgcaaaacggttgcgcttgcggcggaaaaaggcgtgaaaatcggcgctcatcccgggctgttcgatctgcagggattcgggcggcggcagatcgcgattacacccgaggaagcgtatgatctgacgctgtaccaaatcggcgcgctgtcagggtttttaaaagcagaaggtgtcgagatgcagcatgtgaagccgcacggcgctttatataatatggccgccgtcaatcccggcctgtcagaagccatcgctcaggcggtctgtcattttgatcccgggcttattcttttcgggctttccggaagcgagctgattaaagcgggagatcgaatcggactgaggacggcaagcgaagtgtttgcggaccgcacctatcaggaagacggcacgctgacgccgcgttcagagccggatgcgctgattcaggatgacaaaaaagcggtcggtcaagtgattcaaatggtgaaagacagcacggtgacatcacgtaagggacaagctgtaagcctgaaagcggacacggtctgcattcacggagacggagcccacgccctcacattcgcaaaaacaatcaaaaaagaattaaaagcggcagacattcaaatcagcgcgctttcaaaagactgagcagcagagggaggaagacagcatggagcaaaagaaaaaaacagccggaaaggcttccggcaaatggtcgcttcttttaggcgcgacatttttgatggcgacatcatcaatcgggcccggctttctgacgcaaacggccacgtttaccaatacattggcggcaagcttcggctttatcattttaatttctattattttggacattttcgcgcaaaccaatgtatggcggattatcgcggtttccggaaagcgcggccaagagattgccaatatggtgcttccgggcgccggttatgccattgcttttctggtcgtgctcggcggacttgcgtttaatatcggaaacatcggcggcgcgggtctcggtcttcaagtattattcgggatcaaaccggagatcggcgctttaatcagcgcagcggtcgcggtgctgatttttgtcataaaggaagccggaaaagtcatggaccgttttatgcagatcgccggaatcgtcatgatcgtattgacagtgtatgttgccgtaacgacggctccgccggtcggacacgccgttgtgaaaacttttatgcctgatcatatcagtgtgctggcgatcgtgacgcttgtcggcggcacggtcggcggatacattacatttgccggcggccaccgtttgcttgattcaggcatccaagggaaggaagtcctccctcaggttacgaaaagctccatcacaggcgttctgattacatcgattatgcggattgccctgtttctcgccgtgctcggcgtcgtctcaaagggcctgagcattgatcctgataatccggcggcttctgtattccggcttgcggcgggaaatgtaggctataaaattttcggcgtcatcatgtggtctgccgctatcacgtctgtcatcggcgccgcctatacatcggtatcatttttcaaatcattttcaacaaaaatcgaaaagcactcacatggcgtcattatcggttttatcatcgtatccactctaatttttgtcacgatcggccagcctgccaaaattctggtcgcggtcggttcgcttaacggcttaattctgccgcttgcattagcgatgattctgttgggcgcttataagaaaaaaatcgtcggcgattacaagcatccgatctggctcacgattgcaggggcgatcgtagtggttgtcatggcggttatgggcatctatacattattcacgcagatgccgcagctatggagctgatgatatgaaaaaacatatgagtgacatgagtcccgaagaagtcagacagctgatcaggaaggggcagatgaccgggccaacggcgggattggccgcttcttacgcacaagccaatctcgtcgttttgcaaaaggatcttgcctttgattttctcttattctgccagcgcaatcaaaagccttgtccggtgcttgacgtgacggatgcgggttcacccgttccggcaatagctgcgccgggagctgatatccggacggactttccgaaatacagggtttatcggcatggcgtgcttactgaagaggtaacggatattacgccgtattggaaggatgattatgtcgggtttttaatcggctgcagtttttcattcgagcaagcccttattaatcagcacattccaatcaggcacatcgatgagggtgtgaatgtccccatgtataaaacagacattgactgtgttcccgccggcccgttttctggaaagatggtcgtcagcatgagaccgattccggaaaggcttgcagtccgcgcggcgcaggtcacgtcacgttttcccgccgtgcacggcgcccccgtccgcatcggaaatccgcaaagcatcggtatcagcgatttgcatcagccggatttcggagatgccgtaacggtgcgggaaggcgaagttcccgtattctgggcttgcggcgttacgccccaggcggtgatcatggaagcaaagcctgacatcgtaataacacattcaccggggcacatgctgatcaccgatatacgaaatgaatcgcttgctgtcctgtaagtgagaaagaatacaacgaggtgatgacaatgatgcagtatagcggaaatacagcgcttgatatacagccgtacggtgattccgccgttatcatccgctttggcgggcacatcagcgaagaggtcaacggccgggtgcatgcggcggcagcctgtatggaagaacggccgtttccgggcttcgttgaatgtattccggcattcacaagcttaacgatcttttatgatgtgtatgccgtctcaaacataaaaaaaggcgtctctccttttgccctggtcaagaaagaggtgacagaacgtctcagccatataatgaccggccgcaaagaagagcgccgggtgatggaaatccccgtttgctacggcggtgatttcggtcccgatttagaagaggtcgctgagatgaacgatctgaccccggaagacgtcatccgcattcatactgaaggcgaatatctcgtttatatgctcggatttgcgccgggatttccgtttttaggaggaatgtctgagcggatcagagcgccgagaaaggcgtcgccaaggccgtccatcccggccggttcagtaggaatcgcgggaatgcagaccggtgtgtatccgatatccactcccggcggctggcagctgatcggcagcaccccgctccggcttttcaggccggaagaacatccgccgagtcttttgagagcgggcgatacggtgaaattcgtccggatcacagcagaggagtacagccgcatcaaggagggagccgaatgagtatgaaagtggtaaagcccggtctcttgacgacggttcaggacacggggcggacgggatatcagaaatacggtgtgctgggaagcggcgcaatggatacgatctcactgcgcatcgccaatcttcttgccggaaatcaagaaaaagaggcgggactggaaattacgctcatggggcccgggccttcctttgaattttcagaacctgcggttattgccgtcacgggagctgatttcgcctttcatattaatggggagcccgctcctctgtggaaaccggttttgataaaggaaaacagcgttgtctcattcgggccatgcaagatggggagccgcgcttatctcgccgtcgcggggggatttgacgtgcccgccgtcatggaaagcaaaagcacatatgtcagagcggggatcggcggcttttgcggaagagcgctgcaaaaagatgatgagcttccgctcggccgtatgacgccatgttcggaatcaatcgcgtaccgtctgagcgattctttcggacagcatggtttctcagcgcctgattggtctgtcagcagcagaggatttctgccgctgaaaaaaaatccggtcatacgagtgcttgaaggcgctcaatttcacgcttttacagaagaagcaaaattgcgtttttatcacgagtcatatatggtcacgcctcaatccgaccgaatgggctaccggctgaagggcgctccgcttgaattgagggagccgctggaaatggtatctgaggccgtgacgttcggaacggtgcaggtgccgccggacggcaatccgattattctgctggctgacagacagacgacggggggctatccgcggatggcgcatatcatatccgccgatcttcctctcgtcgcccaaacgatgccgggggaacatatcacgttccgggccgtttcgctggaggaagcggaaatgctgcttttagagaaggaacagcagctgaaggagctgaaagcaaggctcaaaatggaatggctgatctgacaaaggggctaaagaccatggaaaacaaaaacaaaaccgtcatcaaatcaatggaactgcttcatttatttctgactgaaccgagcctgagcttaaatgagctggtttctctatcggaaatgccgaagacctcggttcaccggatggcaagctcactggaggaaacgggatttctcacccgggcagcggacggccgttatcagcttggtctgatctttttacaattcggccagctcgtctctgaacgtctggacatcaggaaaatagccaaaccgattatggaagagctgtgcggcgaagtggatgaggccgttcagctgatcatgagggacggagatgaagccatttacgtcgaaaaaattgaaggcactcaaaccgtccgcctgtatacggcaatcggccgccggtcgccgctgtacgcgggagcgtgcgccagaagcattctatcgtttctgccaaaagaggagattgacacatacattcagaagacaaagcttgccgcaatcgcctcaggcacgatgacggatcgggctgaactgcttcactccattgaaagatccttacaatcaggttatacgatcagctattcggaattagaagattacacggcggcgatcggggcgccgattttcaaccacgaaggtaaggtggctgccggaatcagcatcgccggcttcgaagcccggttttcagaggacaggctgccgtatttaaccgaaaaggtcaaaactgctgcacagcatatttctgagaaattgggttattgaccgagccaatttttcttcactcgcgtacattacaatatcgatagtaacgagtggaggaaagtaaatgggacttgtttatacggcgctgggggattctttgacgacggggaggggatccgggccgttttccgccggttttgtccagcggttcgggcgtatgatggcagaagatttacagacaagaaccgacgtatccatctttgccaaatcaggccttgagacgggagaaattctcgggcttatgtccttgccgtacattcagaggcggattcaggctgctgatatgattacgattacaggctgcggcaacgatttgatcgattcggttcaggcatatcagcaaacatcggacgcttcggtgttcaccggcgtgtccggtcactgccatgagaactttgaaaagatgattgccaagatcgccgccttaaaagggccgcacccgtctccttatgagatccgcgtcttcaatttatacaatcctttcccgggaatctccattgcagaaaaatggatatcctcttataatgcgcacctcagcacactcgcatcggcgccgtacgtcaaaatcgccgacgtccacagcgctttcaaaggaaaaatgaatgaatatctctctcatgaccgcgtacaccccaacagcaagggatatgaagtcatggcatgcgtcctgcgggggctcggatacggaagcctcgcccgctcataaccgcgcgctccttttcatcgggagcgcgcttttcgtgctccttaaaacaaacttaaaattgtccgactttcgttctatccgcgcaaaaaatacgctagaataatgggggataaagacagaaatagaattgtgttcaaaaaatgataacagaaaggatggattgctttgctgcgcgccttaaaactgtcactcgcgatgctgattattatacttgcggccgccgcatttacgtatgcggaacatacctctgtcatacagccggttatgctcgtgtttctcggtgcggtcatgttcattcaggggctggaggaaaaacggaaagaaaacgacggctccgggaaattcaatatctataccgccgtttttgtatggtcgatctccttaatcggttttacgcttcacgcgatctgagtctgatagatcctgaaaatgctccacaacgggaaatggtgaataaaaacggtgcagtaaggctttccattcctgatattccggcgatccgcgaaagccttttgtatgatcttctaatgtctcccattccacaagcagcaaatatttatgcgtcttttccatacatttggacaaggaatgggacagataacctttcatgccctcgataatcggctccgcccggcggaatgcctcttcgaattccccctcaagaccttcttttacatacagcatggctgcttctctgatcatctgaaattccccctttttttaatagatacattgtataagaatatggcccgtgacggcaggaaaaacaaaaaaattttaaacaatatgagaaaaaaatccttgccagcctgatttggtttaggagaaaataacagttggaaggcaggggaatagacagtgaaaaaagggttatacctattacttttactcgcaggaatcataggtttgatcggctgctcgaaaacggaatcggccgaagacagaatgaaagatttcgtaaaagactggaacggcggtcactacgataagatgtaccaaagcctcacccaggatgaaaagaaaaaacgatccaaaaaggattttgtaaagcgatatgaaaccgtttatgaacaagcaggggtcaaaaatctgaaagtcactgccgaaaaacaggacgaagacgacaagaaaaaagatgacctccagcacatcgattataaagtcagcatggatacaaaagcagggaaggtcgcttttgaaaatacggccgtcctgaaaaaagaaaaaacagacgatggagaatcatggaacatcgactggaatccttcttttattttcaaacagctttccgatgacaaaaccgtgcagatcgcaaatgaagaaccgaagcgcggacaaatttacgacaaagacggaaaaggtctcgccgtgaataccgaggtgccggaaatcggcattatccctggaaaactcggcaaggataaagacagcgtgatcaaaaaactgtctgaaaaactggacctttctgaagacgatatcaaaagcaaactgaaccagggctgggtaaaagacgactcctatgtcccgcttcaaaaaatcagaccggatgatgaaagcaaggtcaaaagcctgctcgcattagacggcgtgacgaaaacgaaagtcagctcccgctactatccgtacggcgaaaaagcagcccatctgaccggctatattaaaaccatcacagcggagcagctgaaaaaagcgaaagacggccaatacagcgatacttccaaaatcggcatcgccggccttgagaatgtatatgaagacaagctgcgcggcacgaccggctggaaaatttacgtcccgcaaacaggtgaggtcattgctgaaaagaaagccgaaagcggacaggatattcatgtaacgattgacatgaaaacgcagacgaagctgtatgattctatgaaagatgacagcggagcggcagtcgccctcgaaccgcaaacgggagagacactcgcgctcgtcagcgcaccgtcttatgacccgaacggctttattttcggctggggcgggaaagaatggaaaaaactgaatgaagataaaaacaatccgttttcagcgaaattcaacaaactttatgcgccgggatcaacgattaaaccgattgccgcggcagtcggcctgacaaacggcacattgaaagcgtcagaaaagaaaaaaatcaccggaaaagagtggcagaaagattcaagctggggcggttaccatgtcacacgcgtatcagagcgcctgaatgaagtggatctcgaaaacgcgctgatcacatctgacaacatctactttgcgcaaaatgccatagatgccggagcggacgcgtttacaaaaggattaaaaacatttgggtttgatgaagagattccgtaccaatttccgattgaaaagtcttcaatcgctaacggcaagcttgattccgagatccttctcggagatacgggctacggccaggggcagatgctgatgtctccgctgcacttagcggctgactataccgcatttgtaacagacggaaatctcgtcaaaccgacattgatcaaagacggagaaaaaacaccgcaaatctggcataagcaagtggtatcgaaagccaatgccgaagaaatcacaaaagggctgagaggcgtcgttgaagatccgcgcggctctgcatatcagccggccgtaagcggcattaccgtagccggaaaaaccggtacagccgagctgaaaacgtctaaagaagataaagacggcaaagaaaacggctggtttgtcggttacgattataaaaagaaagacctcttgatcgcgatgatgattcaagacgtcaaaaaacgcggcggaagccattacgtcgttgaaaaagcgaaaaagcagtttcagaatcattaaatgacgattttcgcgggctgaaaggaaaatcggccgccgaagcagaatgaaacagcatgggcaattcctgaaaacagagatacaagaggctctaagaaaaagggggatttcacatgcagcgcattcaattggctgaagacctggaattttcaagagtgatacacgggctttggcgtctgaacgaatggaatgtttcagacggagagctgctgaatttgattgaatggtgtatcagccaaggcatcaccaccttcgaccatgccgatatatatggcggttatacgtgtgaaaagctgttcggcggcgctttgtccctttcgccttcaataagggagcgaatcgaaatcgtcacaaaatgcgggattgtcattgaatcaccggaacggcccggaaacaagtcgcatcattataatacgtcgaagtctcacattttagcgtcggcggagcagtcgctcttgaatctgaatacggattatctggatgtgctgctcattcacagaccggacccgcttatggaaccagaggcggtggctgaagcgtttcatgcgctgaaaagctcgggaaaggtcagatatttcggagtatcgaactttaaagcgcaccagtacagaatgctcgaatcctatttggatgatccgctcatcacaaaccaaattgaaatctcggcgtacgagctggaaaatattcatgacggcacgctggatttctgtcaggaaaaacgcattccgccgatggcgtggtcaccgcttgcgggcgggagcgtctttaccggacaatcagataaggacgtccgtatccgtgccgcgcttcgttccgtacaggaagaaatcggtgccgcttccattgacgaagtcatgtacgcatggctgttcacccacccggcagacatcatgccgattgtcggcagcggaaaagagaaccgcatttccgccgcggtgcgtgcatccgcgtacaaactcagccatgatcagtggttccggatttataccggtgtccaaggctgcgatattccataaacagaacaaacgcccggaagctatcttccgggcgtttgtttatgtggtgtgcaatgtctaaaaacaagtaaggtcactttgaagtatagccgtgcggatcaagagtaacaagcgtcatggcatattatctgacacatttttctttttcaatactgtcacacggcccagtgccaaattgccatttgaaaatggttgaataatcattgaaagcgttttatattataacttacaccactttccccggcagcactccccatatgccatacttctcacaactagaaaatctggaggcgcgtttcatgtatatgacagcgagagaacaaaaattaatgaaacatctattactgcagaaccggtacgagacagtgcatgaactggcggaagctttacaagtcagcacaagaaccgttcaccgcgagttgaaaacaatcaaaccgatgatggaatcattcggtctggcacttgataaacagcccggcaaaggactgaaagcggtaggaaacccggaggacaaacaaaaactcctgtcagacctgtcctatgaacagcatgaatacagcgctgaggagcggaaacttttaattctatgttcactattagagtctcaagagccgatcaagctctacagtctggcgaacgaactgcaagtgacaaacgcgacgatcagctatgacctggatgagctggagacttggattgcgcccttcggcttgacgctgatccgaaaaaggggcttcggcattcagctgacggggccggaaaatgcgaaacggaaaatcgtcggcaatctcatcgtcaaccgccttgatattcaaagctttttggaagcggttgaattgaatattaaaggaaaaccggacgatgctgaaaaaatgttcggcgtcgtaaataaagcggaacttttgaaaatggaccggctcttaattcagctcaaggaaaaaatcgcgatcgccttatctgacagctcatacatggcgcttgcggttcatttaacctttgcgatggaccggatcaggctcggagaaaccatcacgatggaggcttcggaactaaaagcgctgcagcagacgaaggagtacggctctgcgctggaaatggcaaaagagcttgaaaaagcgttcggcgtttcaattccggaagctgagatcggatatatcaccattcatttgcggagcgccaaccgcaaatacaaaacggaattcaaaccggaagacatagaggttgaaacggccttgcaaacgaagcagctgatcggcttcatttctgaaaaaattaaaattgatctgacggaaaacggttctttatacgacggtttaatcgcccatctggagcctgcgatcaaccgggtaaaagaaaatatcgacatgtacaacccgatgaccgagcaaattaaacgcgactactttctgctgtacatggccgtagaagaaggaatggaaaaattctttccggggcttcttttctctgataatgagatcgctttcatcgttcttcacttcggctccgctttggaaatcaaacgggaagaggcgaagatcaaagcgctgatcgtctgttcaagcggcatcgggtcgtccaaaatgctcgcatccaggctgaaaaaagagctttcggaaatccgttcctttgatatgtcttccctcatcgaactgaaggatcgagacatcaccgcgtatgacatgatcgtatccaccgttccgatcccgtatgaaaacattgattacgtcatggtcagtccgcttttaaacgaagaagacgctgatcaggtcaagcagtacatcaaaagaaaaattccgctgattcttgacaaaaaaagaaacggtaaaagagaagagaagcagccggagacgcctgatatgctggaagcggccggccgtatggcgcattacgcggcggttatccaaagcgtgctgcggaacttttcggtcaaatccattgattcaaacacggcgtatgagctgtttttgaaccgtatgtttgacatgctggagcaagaaggattggttcataatgcccaaaaaaccgcacagcgccttgctgagcgtgaacgacagggcggactcggcattccgggaacggcgttggccctgtaccatctcaaaaatgaagaaattgtcacgccttttttcaaaatttatgatttgacggctccatgcagtgtcaaaggcatggacggaaattccctgaccgtcgaccgcgctttggtgatgatggcgccggctgatatgcccgctgaagggtcggaaatactaagtgcggtcagctcggccatcatcgagtccgaagacagtataaaagccttccagactgaggatgaggccgatttatacaaacgtttaaacaagctgttttatcatttcattcaggagaaaggacagcggtaaacaggaagcgcacacctcatgtggggtgtgtttttttgtgcatgtatgagggtaaggggaagggaagaaactaaaaacacgggactattgtatcattcactgatggaatagttctaaaacaaaatagttttacaagttatattttttggtttaaaatgggttgcgtgagaaagaaaatctgacagagtttttttgtgatttatcattatgggagatgaaaatatggagacattacagcatctgattctgcatgacatttcaaatagcgaagagatcgaagctgtaaaaagcggtgcgtataccctgacctacgcggaatatcgaaaacgaatcaaccagcttgcacaagcgcttcttgataaaggaataaaaaaaggcgacagagtggcgatgctttgcaaaaacggccacgcggcatccattgtcatgtttgcggcactcgaaatcggcgcggtggttgtgccggtcagctggcaattaacaccttacgaaatgaaaggcattttagcagcctgtgaaccgaaagctgttttttacggcactgaatttaaagagatcatggaagaagtgctccctgcgctggtatcttctcttaaactgaaggtcgagaccggaacagctgcggagacaacgcctcagtttgacgctttattgacaggctccggtgatacaccggatgtcgaaacggtgtctgaaaacgatacggcattgctgatgtttacctcaggtacaaccggcaatccgaaacgctgcatgatcactcacggcggcatatacaactacgtaaacgcgacattggcatacacggggagaatgcagcatgtccgcttcttagcatgccatccgaattaccatacgagcgcgattatctgccagatggtcggcacgatgagcggaacgacattcattatgacagacaatcaggaccctgtggaaaacctgaagctcatcgaaaaagaaaaaattcaaaccatcatggcgctgccagtctatttcacatacctgctgaaagcatgggaaacgcaccagactgacatgtcttctatcgtttatatgatgacgggaggcacaaaggtgccaagcagcctgatccagcagtatctcgacatcggtattccgctcatgcacggatacggaagcacggaagcgtggggcatcagctcttggaatccgcaaatgggaatggataaagccgcttccgcgggtaaaccgatggaagaagtggatgtccgcgttgtagatccggaaacaggtgaagtccttccgcaaggctcaatcggagaagtcgttgtgacaagtccgtttttattcaaaggctacgaaggtaacgaagaagcgacacgaaaagtgctgaaagacggctggttccataccggcgattccggatatgtggatgaagacggatttatctttatcaccggacgttataaagatgtcatcatctacggcggcgacaatatttatcccgaccagattgaagaggtcattcagcaagtgccgggcattctcgaaacggcggttgtcggtatccctgatccgctttacggtgaaaagccgaaagcgttcatcgtgacaaacggcagagaagacctgacagaagaagaagtgacccgattccttcaagaacgtcttgccgcctttaaaattccggaaattgagttcgtcagcgaacttccgaaaaacaaccttggaaaagtgagaaaagacgtgctccgcaaacaagcggtacgttcataattgaaaacaaaaacccggctgccagccgggtttttttcttgcgttccatgtgaaacatttttctccgaaaacgttttgaactgtctcaatcatgtttatccggaagactgccgaggtagacaagaaatatgagatcgaacaagaaggaggaacttgacatggaaaactatccgaaggaattcccggcggaatcacaaaaccgccagccgggcattgaaagcgaaatggatccggcgcctgtatatgaatacaaagaatataaaggcgctgataaattaaaagggaaaactgcacttatcacagggggcgacagcggtatcggacgcgccgtagcggttgcttacgcgaaggaaggcgcaaatgtcgcgatcgtctattttgatgaacacggtgatgcggaagatacaaaaaaacgagtggaagaagaaggcgtaaaatgtctgttaatccccggcgatgtcggtgaggaagacttttgcaatgaagcggttgaaaaaacggttgaagaattcgggcgtcttgatattctcgtgaataacgccgcggaacagcatccgaaagaaagcattaaagacatcacaagcgagcagcttcacagaacctttaagacaaacttttactcacaattttatttgactaaaaaagcgattgattacatgaagccgggcagcgcgatcatcaatacgacatccattaatccttacacaggcaatccgcagctgattgactacacggctacgaaaggcgcgattaacggttttacgagatccatggcgcaagcgctcgtcaacgacggtatccgtgtcaacgccgtggcaccggggccgatctggacaccgctcattccggcgacattctcagaagaaacagtcgcttccttcggtcagactacgccgatgggccgggcaggccagcctgttgaacatgtcggctgctatgtgctcttggcctcagacgaatcatcttatatgactggacagacgctgcatgtcaacggcggcaaatttgtaaccacataagggggctgaagcatgacgatatcgaaacatgatgtgaatgcatactatcaaaaagcgggaatcgttctgactgataatgaagtcgaagacattcaaatcatggattacggcttaggcaagcttgaggaaaccgggcttcagctgtttatttacgtgaataccgaccgctactgttcgaaagaattggtgctcttcccgcgccagacgtgtccggaacaccgccatccgccggtcggcggcgagaagggaaaacaagagacattccgctgccgctgggggaaggtgtatctctacgtggaaggcgaaaagacagagaacccaagcgtcctcccgccggaagatgacaaggaatactacaccgtctggcatgagattgtgcttgagccgggcggacaatacaccattccgccggatacaaagcattggtttcaagcgggagaagaaggggcggtcgtcacggaaatgtcatcgacaagcacggatgatcacgacattttcaccgacccgcgcatttaaggatgaggctgcacgcctcatcttttttcgtatggaaaaaaatgaatttacctgtataatggctaataaaggaaagaaggtgtgatcgtgttttcctgtcaaatccgggaacatctgacgatcagattgcttgccaaagaagatacggacgaattgtattctgttatgaagcgaaatcaaaaccatctcagcgaatggctcagctgggcggaagaactggctgatatcgatacgtaccgcgatgtgatcatccccgaatggcgctataaatacgcggaagagaatgggtttgacgccggaatttttgtgaagggccggttttgcggcatgatcagcatccataatgtcgatccagtcaatcaaaaagcagagatcggctactggctggatcgagagcatgaaggattcggcattatcaccgcaagctgccgggcggtcatcacccatgcatttcaggatctcgggctgaaccgcattatgatcagcgcggctgaaaaaaacacgaaaagcagggcggtggcggagcggctcgggtttcagaaagaaggactgacgagagaaggcattttcgtacagggcgcctatcatgacacggtgaactacagcatgctgaagcgggaatggagcgaagatcggcagaagagcacatttcttggtttaaatgtctccccaatgtggaaaagtaacagcggagacgttaaaaaggagtgattcttcatgaatcaaaatgaaatcaaagaaaaagtgcttgaagtactggatcatcataaagtcggttcgcttgcgacggtagagcaaggcaaaccgcattcacgctacatgacatttttccatgacggcttaacgatttacacgccgacgagcaaagacactcataaagcggaagaaattgaaaacaatccgaatgttcatattctgttagggtatgactgtgaagggttcggtgacgcttatgtggaagtggcaggaaccgccaaactgaacaactcagcagatttaaaagaaaagctgtgggatccgaaactggaacgctggtttgacggaaaagacgatccgaacctggtgattcttgaaattgaaccgaagcagatcaagctcatgaacgcgggtgaaaaaacgccggccgagctggaactttaataaatcatttgattattcaggggcaatctgttatacttaattgctaagtgacaacatgcaaataaaaaagaaagtaaacttcttttttctgttttgatatagaagcttcaggcttcaacggacagcttgaaaaaaagctgagcttattcttttccttctgatattcgcccctaacgaagagatggaaaaaagactttttgttttacaattcacaccggcgcggcttcggagccgcagtgacgattgagaggtagggctttcgttgtcttgtgttcaagaacttccatggtgtttactttcgaagaatgattctgtcggaactgtttatacgaatcacccgcgggctaaggcgggcaaccatatattatttatttgcgtaagaaaagaataagacaaaaaccgcgccggacatccgggcggtttttttatgtaaccggccgaaacctcgccgcagtctgcagagtctaatcagtagaaaagatttggaggaatcatacattgcacgttattacttcacaagtactgtttatcttctgttttctgctgctgatacattcgattgaaacgcttgcctatgcaacacggctttccggcgcaagagtcggatttatcgcgtccgcgctgtcattatttaatgtcatggtcatcgtgtcgcgcatgtcaaacatggttcagcagccgtttaccggacatctgattgatgccgccggatcaaatgctctgtctcttgtgggcgcccagtttcgatttttaatattcggctccacggtcggaacgatgctcggtatctgtcttttgccgacattcgtcgcgttattcaccagggcgattatacacttggcggacggaggaggctccgtcatgcaggtatttaaaaaaggattttcactgaatgggctaaagcatgcgcgttcttatatcagactgccgtcagtctcctatttaaaggggcttcaattccgaatgatcccgaaacgcttgtttgtcattaatatggtcattacgtctatttacacgatcggtgttctgtccgctctgtacgccggccttctggcgcctgagcacagcacgaccgccgtgatggcatcaggcttaatcaacggagttgcgaccatgctgttggctgtatttgttgacccgaaagtctccgtactggcagacgatgtggcgaagggcaagcgcagctacgtctccttaaaatggacatcattgacgatggtgacatcaagggtggcggggacgcttctcgcccagctcgtattcatccccggcgcttattatatcgcctgggtgacgaaatggatgtaacgcatgaaaaaagctcctctgcagaagaggagcttttttattgataatttctcaggccgcgatcataaataaaattaccgaacggaataaaggccgcgataaaaccggcggctgaccatttcacatgccatttgacagtaaacgccgcatacgccagcaccgccagataaatgataaacaaaccgccgtgaatggaaccggcaatggtgacggcgagcggatgatgagcccaatacttcagcggcatcgcgataaacagcagcaccaaaagcgacattccttcaataaaccccatcgtgcgaagtctgccgatcggcgtgtgtaacatacagctccctcctgtcggacatcttttttcctctatactataagcaaagggcagtcctaatatgaccatttcgcgtcagttcctaaaaaacctttattaattcagcctgttgttcttgtcatttttcggatttctcttgataatatagccaaaagggtaaggaaggactacagtcatgaaactagataatgttgatctgagcatcattaaagagctgcagcgggacagccgcctgtccatgcgggagcttggcagaaaaatcaaattgtcagccccgtccgtcacagagcgtgtcagacagcttgaatctttcggcgttattaagcgctatacattggacattgatcaaaaaaagatcgggcttcccgtctcctgcattgttgaagcgacagtgaaaaacggaaaatacgatcaattcaaaacctacattcaatccattcccaacattgaattttgttttcgggtcgccggggcggcgtgttatatgctgaagattaacgcggacagcctggaaacaatcgaacacttcattaaccgcacctctccgtatgcccaaaccgtgacccacgtcattttctcagaaattgacacaaaaaacgtcctcgattagagagagcgtgaggaagtctgttataataacaggatgattgtgaaagaaagagaagtgaaaagcatgtcaaaaacagttgtattagctgaaaaaccttcagtcggccgggacttggcccgcgtgctgaagtgtcataaaaaaggaaacggatatcttgaaggcgaccgctacatcgtcacatgggcgctcggacatctggtaacgctcgctgaccctgaaggatacggcaaagaatttcaatcatggcggcttgaggatctgccgattattccggagcctttaaagctcgtcgtcattaaaaaaacaggaaaacagttcaatgcggtcaaagctcagcttgtccgaaaagacgtcagccagatcgtaatcgctacagacgcaggacgggaaggggagcttgtggcccgctggattatcgaaaaagcaaacgtccgcaaaccgattaagcggctgtggatttcctctgtgacggataaggcgattaaagaaggatttcaaaagctccgcaacggcaaagagtacgaaaacctgtatcattccgccgttgccagagcggaagcggattggatcgtcggcatcaacgcgacccgcgcgctgacgacaaaatttaacgcgcagctgtcatgcggacgcgtccagactccgacactggcgatgatcgccaagcgtgaagcggacattcaggcgttcaaacccgttccttattacggtctccgcgcggcggctgatcagatgacgctgacatggcaggataaaaaaacaaagcagactagaacattcgatcagacggtgaccggccgtttggcaaaagacctgcaaggaaagccggcagtcatttcagaattgaaaaaaacggcgaagaaaagcttcgcacccggtctttacgacttgacggaattgcagcgggacgctcataagcgcttcggtttctccgcaaaagaaacgctgtccgtgcttcaaaagctgtatgaacagcataagcttgtcacttacccgcggacagattccagattcctttccgcagacatcgtgccgactttaaaagaccgtttaaacggcatggaagttaagccgtacgcgcaatacgtcaatcaaatactgaagcggggcgtcaaagcgcataaaggattcgtcaatgatgcgaaagtatcggatcaccatgccattattccgacagaggagccgctgatcctttcaagcctcagcgacaaagaacgaaagctttacgatctgatcgccaaacgttttctcgccgtgttaatgccggcgttcgaatacgaagaaacaaaggtcacagccgatatcggcggcgaaacatttaccgcaaaagggaaaacggttcaatcgcctggctggaaagccgtgtatgatatgtacgaggatgacgacgatcatgaggaagacaaagaccagaccctcccggatcttcagcagggtcagcgcctcactgtctcatcactgaaagaaacgagcggacagacgaaaccgccggcgcgctttaatgaaggcacgctgttatccgcgatggagaacccaagcgcctttatgcagggagaagagaagaaccttgtgaaaacattgggtgaaaccggcggactcggaacagtcgccacccgcgctgatatcattgaaaaactgttcaacagtttcttgatcgagaaaaaagaaaaagatattttcattacgtcaaaagggaagcagctcttacagctcgtcccggaagatttaaaatcaccggccttaaccgctgagtgggagcaaaagctctccgccatcgcagcgggcaaactgaaatccgccgtcttcattaaagacatgaaaacatatgcgggcaaaacggtgaaggaaatcaaaaacagcagccagactttcagacatgacaacatttcaggcaccgcctgccctgattgcggcaaaatgatgcttaaagtcaacggcaaacgcggcacgatgctcgtatgtcaggatcgtgagtgcggcagccggaaaacgctggcaagaaaaacaaacgcccgctgtccgaactgtcataagaaaatggagcttcgcggccagggcgaaggccaaaccttcgcatgtgtatgcggccaccgggagaaactgtccgtctttgaaaagcgcaaggcgaaagataaatccggacgcgcatccaagcgggacatcaactcttatatgaaaagccaaaacaaagaggagccgatgaacaacgcgctggcagaacagctgaaaaaactcggcctggataaatagatcagagaaaggcagcatttgtaaagaaatgctgccttttgttgtgtttttaactgtaatgggaatacgatccagacgaagagggaaaaggtgagcagacggcgctcccatttaaaatttcccaatgtgaaaaaatgctagtattcttttatcgtttcctatatagtaaaaatactttgtgaaaaaataagataagggtcaaaaaaaggatttataaaataggaggatggactgtgaagcaattcgtttttcgtctgatgatccttttgatttcgatcgttctgacggcggggtgcgcggaggccggcactaaaaaacaggcggcagccgaaccgtccgtgccgcttcagcccgcagagcattttatttatcataaattgatgaacgggcgggggatgatccggacgaacataaccggtgagccggaatatttatcagagtctctcggactatggatggcatttttgctgaacaggaaagatgaacggcagtttcaagcgcaatatcagcttctcaccgattcgtttctgacgaaaaacgagctcgtgtcgtggaagattgacgggaataaagcgagcggcaccaatgccttaattgacgatttcagaatcatgaactgtctgaatgaggccggaaccctatggggaaacagtgaatacgggaaaacagcggtgcagatcgggaaggcgctggaaaaatacaatacgaatgacgggtattttacggattattatgatgccgcttcaaatgccgcgtcaaagaccgtgacgttgtcctatgtcgatcccggcgccttacagatgctcagagaaaaggggattatcgatgagaaaacggaaaaccggaacctcgatgttctcaatcttgcgcccctgaaaaatggttttttgccgaaatcgttcaataccgaaactagggaatacaaatatgacagcgaagtcaatgttatcgaccagctgtatgccgccgtgaatctgaagcggggcgatggcaaagccgctgtgctgtcgaaatggatgataaaggaatttaagtcgcgcggacagctgtacggacgatacagcgcagacacgaaggagccggcggttcaatacgaatcaccgtccgtttacgccctggccgttctttttttagcagaacaaaaagctgatccggctgtcatcaagccgctttatgaaagaatgacttcatttgaaacactggacacgctgaaacctgattacggcggctatatgagcgggggcgatacacattctttcgataacctgctgccgcttctggctgaaaggaaattgtttaatgaaaatatcattcaatgaatcacaaaaactgtgcagctacacagcagttatgctggtgctgctgtctttttttatttactatgcgtctcagcaatccgcagggcttctgataacctgcatcacattgcttgtcacgggagccggcatatggttcggggcaatctacgcgctcgtcatcaccttactcgtcttatttgttctcggcagcctgctcctgtggtttcagaccgggagctttatggcgtctgccggtgccgaaagtctgcaggtgctggtcatttgggggattgcgctgctcgtcttttcttacatagcgggaaggattcacgagttggcgaaggggcttgagcgctcagtgaaacagctgcgtgaagagattacgagctttgtcgccgtcgacagggtgaccggctttgacaaccatctgcggatgaagctggagctttccgaggagatcaagcgggcggaacgctacggcaattccttcgtctttttgctgctgcacatgcattatttcaaggaattcaaatccctctacggagaaaaagagaccgaccgcctgctggcatttatcagccgccaaatccggtcaagcgttcgggaaacagacaaaaaattcaggccgtccgccgaacgattcggcatcgtgctgacccatacgcctgaagaacacatgccggccgttctgtcgaagctgaaaaaggaattggatacgtaccggctgcaaaacggtaaatacgtctccatcaccttccgtgtatgttacttggcgtaccgaaaggatttacaaacggccgagcaatttttaaatgaactggaaaacgagatgatgatgaatgaactctaaatggatacgtctcttactctcggcgctcttcatgatttcggcggtttatgttccccttacggcggaagcaaaagacaaaaaggacggcattctcattatttatacaagcacggacggcaaagaaaccgctgaggtcaaaatgcttgatctgaccgcgggccatttctcatccgccgtcaccgtgaaaagcgacggagacatcacagccgcggacctcaaaaagaatcggcgggtcatctattacggcgtcacgaaaaaaaagctcagcacatcatttgtgtctctgatcagcagcatgccgcagcagcttatcaccatcggctataacgccggacagttccgccaatttgcgggtttgtccctgacagagaaagaaacggtataccgcatttacggcaaagaagaaaaaacagacatgccgcttgaaaaagggatgtccgtgctcggcgtatcgggagtaaaaggaaagtccctttatacataccggtccggtgacggcagcacccgcccttttatgtggaaaacggcgcgctctgactattatttcggtgtgacgagcctgttaaatgattcgtttctgacggcgaaagcgctgcgcaacgcattcggagaatcagcgggcggcaccctcctttatttacggcttgaagacatcagtccgatgtcagatgaaacattgctttacgaagcgggcgcttacctgcataaaagacacattccgtttattctggcggtcattccggtctatctcaatccggaaaacggagaaaaagtatacctggcggacaagccgaaaatggtcagcgtcctgaaaaaacttcagcaaatgggcggcagcatcattattcacggctacacgcacgcataccgatacagcgaaacgggagaaggctttgaattttgggatgccaaagcggatcagccgattacgtcagaaaatgcggatgatactccggtcaagcttgaaaaggaacaggattttccgaatgaaaaagcgtaccgggcgtatgtgaagcctttccgtgaaaaagaaaaaatctacacgagaacgaagctggagcaggcgattgacgatctgacagagctcggcctttacccgctgtcattcgaagcgccgcactatacgatgtctgaagaaggctacaaaatcgcatcttcttatttctccagcattttcggacaagtgcagctcagcggcacgacgtggaaaacctcgggcgcccctccgttcgtctcaaagccggctatgcttgacgggatgacgctgtaccctgaaacaatcggttatgccgataactcaaaggaaaatccgctcggagatatggagaatcatatttcgcagatgattgatttcggcggcggaacggcgggcggtttctaccatccgtatctcggcatgaaatacctccccgagctcgtcaatcagatggagcggattcccggcggcgagtggctcgatctgaagaaaacgaagcaaacggtaacgtcggacagcgtcaggatcaaaacggacggagacggaaccattcatgtggaaaacaagattcatccgataacggcctttttcaatcaccatcagcagacgcctctggaaaaagcgctttggattctctccggcgtggtgttattgtttatcatcatgttcgcctgctacgtcctttatttgcgcgccacattaaaaaaacgaatttttaaggagagaaggagccttgagtaacattctgttttttatctcattaagtttaatatgggtgatgcttctctatcacatgtttctgatgcagggcggattcaggcattatatgaccttcgaacggaacattccgaaatggcgcgcaaagatgggggagctcccgaaggtcagcgtgctcattcccgcgcataacgaagaggtcgtcatcaggcagacgctgaaggcgatggtgaatctgtattatccgaaagacaggcttgagatcatcgtcgttaatgataactcctccgaccggacgggagacatcgtcaatgaattttcccgtcagtatgacttcattaaaatggtcattacaaagcccccgaacgccggaaaaggaaaatcttcggcgctgaactcagggttcgcggaatcgaacggagacgtgatctgcgtgtatgatgcggacaacacgccggaaaaaatggcggtgtactacctggttctcggtctgatgaatgatgagaaagcgggagcggttgtcgggaaattccgtgtcatcaacgcggccaaaacgatcctgacgaagtttatcaatattgaaaccatctgctttcagtggatggcgcagggcggcagatggaaatggttcaaaatcgccaccatcccgggaacgaacttcgcgatcaggcggagcattatcgaacagctcggcggctgggatgataaggcgctggcggaggataccgagctgaccatccgcgtgtataatctcggctatcatatccgctttttcccggcggctgtgacatgggagcaggagcctgagacatggaaggtgtggtggcgtcagcggacaagatgggcgcgcggcaaccaatacgttgttctcaagtttttatcccaattttttaagctgaaacgcaagcggatcatcttcgatctgttttatttcttttttacgtattttttgtttttcttcggtgtgatcatgtcaaacacgatttttatcatcaatcttttttacgacctgcatctggcagtcgggtttttggcgatgattttgtggatactggcctttttcctgtttatgactgaggtcatgattactttaagcattgaaaaaacagaaatgaacaaacaaaacttctttatcgtatttctgatgtactttacatactcccaggcttggatcgtgctcgtcatctggtcattattcacagagatcaagcaccgcttgttcaagcaggaagtcaagtggtacaaaacggagcgatacaatcaaaataaaagcgggtgacctttttgaaaaaagcgatcatattgataactggccttttgctattgatgtctaacgggcaggcggccgcggcccgggaactgaaaacggacggttccgccctcggaacaagcgccggcgcaaaagagcagcaggcgctgactggcgatctgatgacactgtacggggcgaaagacagcgcagagctgacctatcagattcctgcgggagcttcgaatgccgatcagtcgcttctgattgattacgaggcgtcaaacttattaattgccccgtcttctttaaccatcgccattgatgatgaacccgtcaaatccataaagcttgacggcagttccaagcggaaaacggtgaagctcaatctcagcaaaagccaatccgcccaaggctatcacaacgtatcattgcaattttacggcgtattaaaagagggcgtctgcgtcaggcaggatacgtcaggcaactggataaaaatttatccggacagccgccttgtgctttcagaagcaagcaagtcaaagggagcggatctcggccatttcccgtatccgtttgcccaatcaggcaatacgggtgaagaaaccgatattattcttcctgacaaaccgacctcggcggaagctgaagccgcagtaaaaacagaagcatttctgaaaacggcagacagcaggctgaaggtatcctatgtaaaagaatccgacgccggcaaaatcagcaatccgtcaattgtcatcggcgctgatcagcattggaacgggaaaataaaagagcttttcgaacgcgggaacatcaaagcgaaaggaaacagacttcttctcgctgaacgggttctgacatcaggggacaaacggcagcccgtcctgtttgtcacggcgcaatcagacaaaacgctggcggataaaatccgcgtcatcacagacagcgcttattcaagccagctgggcggagatactttgacaatcggccgccttcagcccgctgcggaaaagacaggcaataaactgacactagaggacttcggcgcgggaaatgtaacggttggatcaaacaaaacggcgtcagagcacttcttttaccctgcggcggccgctgttgataaagacggtaaggtcaagctttcacttacgttaaaaacgtcggaatcgatccggacgaaggcggattcagcaaatgacgccgagagagcggagctgaacgtcatggtcaacggacagccgaatgcggtgcgtcttgatgatctcggcaatcaagataaagacggcttttaccacgtctcaatcccgattgatcccaagcttttgcgaagcagcaggtacattgatctgcaatttgtcacatcaggtttgaaacataacaatccgtgtatcgaccgtgacgaaaacaaatgggtctatattgataaaagcagcacgctgacgtatccggtaagcgatgcggcgcagaaagctgatttcgggcaatggccgctcccgtttgcgggcggcgggaaagagaaaacagtgatcgtcatcccggatggcgtaaacatgcagacactgaaagagctttctctggtggcggattcattcggaaacggctttaccgtaaagacggcatcagacatgaaggaagcggatgccaaaggccggaatgttgtgtttatcggaggcctgccgcaaattccgcttttgaaatcaaacgcctctaagcttctcgtgccgtcagaccgcagcggcgcgtacgatgtttcttcgtttcagatgctgaatgagacaacgaaacaagtcgcgtttacccaggaatcaccttgggactccggccgaagcatcgctgtttttgctccgttatcaggaagcggcgcgtctgtcacaaaagagctgatcagctttttagacagcacaagcgatgccgcaactgtcattaacgaaacagccggccggcagctgttttcgaatcatcagcaaatcaagtccgatgacagcagtccggcggctgatacgaagagcccgtccgcagcactgaatgttacgtatattgctgttttcgcggcgcttatgatcattgcggccggtctgatctggctgacggcaagaaggaaaaaaagaaaagaggatcatgaaaaaagcgaagagtaatgaaggaaaaagaggccgttaacaggcctctttttttgtatttttatttccatttttggcggtgatttttttatttttgaaacagcataaaagcccctttacaaccggacgggacgggagtatgatctcttttataatctatatcgcttaatctgtaatcagagcgggggaaccaatccgcggcgcgtgatgccgcttggggtgaatcctttttcaggtagggccaactctcatcagcccgaatccgacagctaacctcgtaagcgttcatgagaggagatgaatgaaacctgtgcacgattatggcgcaggggcatccgtttgcctctgtgtctttttgctgtgctgaaatatggcatgcaatcagcattcggagacatcatagcagtaagggtttgtaaagtaaatcaaacggaaaatgaaaaaaaggggaagacaacaaatgtaccattcaatcaaaagatttttgattgggaaaccgctgaaatcacaggcagccggagagcagaaactgacgaaactcaaggcgcttgccatgctttcttcagatgcgctgtcatcagttgcttacggaacggaacagattctgatcattttggctgcggtaagcgcggccgcgttttggtattccattccgatcgcagcgggtgttctcattttgctgcttgctttgattctgtcctacagacagattatttacgcttatccgcaaggcggaggcgcttatatggtttctaaagagaatcttggtgagaagcccggcctgattgcgggcggctcattgcttgttgattatattctgacggtggcggtaagcatttctgccggaactgacgccattacatcggcatttccggctttgcacccgcatcatttgctcattgctgttttgcttgtaattctgattatgattttaaatttgagagggctgtcagaatcggcgtccattttggcgtatcccgtctatctgtttgtggcggcgcttgtccttttgatcgtcgtcgggctgtttaagctcatgacgggccaggttcatccggccgagcatacaccaatcggcacgcccgtggcgggcatcacgctgtttttgctgctgaaggccttttcatccggctgttcggcactgaccggtgttgaagccatttcaaacgcgatcccggcctttaaaaatcctccggcaaaaaacgcggcccgcactttggccatgatggggattctgctggcgatcttatttacggggattacggtgctggcgtacggctacggcacgggtccgaagcctaacgagaccgttatttcacaaatcgccgcggaaaccttcggccgccatacggtgtattatttcattcaaggcgttacatcattgattctcgtgcttgcggcgaatacgggcttttccgcatttccgcagctggcgtttaatttagcgcgcgatcagtatatgccgagaatgtttacggtacgaggcgaccggttaggcttttcaaacggcatcatcttcctcggtatcgcgtccatcctgctcattcttttattcggcggccgcacggaatatttaattccgctttatgccgtcggcgtgttcattccgtttacgctgtcgcagacgggaatgtgcatcaagtggatcaggcagaagccgaagggctgggcggtaaaaatgctgattaactcatgcggcgccgccatttcatttatggtgctgtgtattttattcgcaacgaagttcaatcttgtctggccggtgctgttattcatgcctgctgtcgtgatgctgtttttcgtcattaaaaatcactacaccgcggtcagtgaacagctgcgggtcgttgatcagcagcctgaggaaatcaggggaaccgtcgtcatcgtgcctgtcgccggtgtcaccaccgtcgtccaaaaatcgattcagtatgcgaaatcattatcggatcaggtcattgcggttcatgtttcctttgacagagaaaacgaaaaaaaggtggaaaaacgctgggaagaacttcataacggcgtccgcctcgtcaccctgcattcctcataccgcagtctggttcatccgtttgataagtttttagaaacggtcgaacagaaagcgaaaaaagaacagttctccgtgatggtgctgtttccgcaatttattacgaaaaaacgctggcagaccatccttcacaaccaatcagccttcttgctccgcgtccggctgttttggaagaaggacatcatcgtcgccaccctgccgtatcattttaaaaagtaacggaaagaccgcaggctaaaatgccgcggtcttttttgtaaaggaggacgacatggcacaaggcgcttttgtcatcatacaaaatgacgggcgggacatattgctcgtaaaacgaaaagacgttccactatgggatttgcccgggggcaggattgaagatggtgaaacacctgaagccgcagccatcagagaggccttcgaagaaaccgggtataacgtgaccatcctgcaaaaatccggtgagtatgaaaggccggcatttgaagatacacagcacgttttcatcggagccattaccggaggaacaccgctgatgaacggatcggaaaccgccgatttacgctggttttccccaaaccggctgccgctgttcatggtgccgaacagaaaacggcaaataaaagacggactcaatggggcggcaaatcgtaaggcagtccttaaagaccgaaatctgttatccatccttgatctgctaagaaaaaagctgagagtatagcccgtgtttcaacccgtatgaaaaaggggatgaatacaggtaaaaggaggatgcagtatgccaagtaaaacagcaggacacgtaatgacggagctgcttgaacaatggggagtcggtcatatatacggcattcccggagacagcattaatgaatttatcgaagaattgagacaagaacgaaataacctgacattcatccaaacccggcatgaggaagtcgcagccctggctgccgcggctgaggcaaaactgaccgggcagatcggtgtctgcctttcaatcgcaggaccgggggccgttcatctgctgaacggtttatacgacgccaaagcggacggcgttccggtgctggcgattgcgggacaggtggcttccgatgaaatcggccgtgacagctttcaggaaatcaaattagagcaaatgtttgaggacgtggcggtattcaaccagcaagtacatacggcagaagcgctgcccgatcttctgaatcaggcgatccgcacggcttacagcaaaaaaggcgttgccgttttaaccgtttctgatgatttattcgcgcaaaaaatcaaacgggagccggtttacacatcgccgatatacctcaaagctgatatagagccgaaaaaagaacatctcgtgacatgcgcgcaatatattaacaacgcaaaaaaaccggtcattctcgccggccaagggttaaaatcagcaaaagaggagctgctcgcattcgccgataaagcggccgctccgattgtgatcacccttccggcaaaaggcgtcgtgcctgacagccatccccactttctcgggaatctcgggcaaatcggcacaaagcccgcctacgaagcaatggaggaatgcgatctgctgatcatgctcggcacatcgttcccatacagagattatctcccggatgatacgcccgccattcagcttgattcagatccggcgaaaatcggcaagcgctatcccgtcaatgcgggaatcgtcagtgatgcggctctggggctgaaagagctgacggaatacattgaatataaagaagacagaagatttttggacgcctgcaccgagcacatgaagcattggtggaaggaaatcgaaaaggatgaaaccgaagcgactcatccgctcaagccgcagcaggtcattgcccggcttcaggatgcggccgcagaggacgccgtcctgtcagtggatgtcggaacggttacggtgtggatggcccgccattttaaaatgaagaagcaggactttatcgtctcaagctggctcgccacgatgggatgcgggcttccgggagcgattgccgcaagccttgccgaacctgagcggcagtccatcgctatttgcggagacggcggattttcaatggtgatgcaggatctgccgacggctgttaaatataaactgccgattacggttgtcatattaaacaacgaaaatttaggcatgattgaatatgaacagcgggtcaaaggcaacattgactacgtcacccagctgcaaaatatggattacgccgcctttgcagaaagctgtggagcaaaaggcatcaaagtgacgaaacacgaggaattggctcctgcttttcatgaagcgcttaactcaaatgagccggtcgtcatcgacgccgtcatcggcgacgagccgccgcttccgggaaaaatcacttacggccaagcgaagggcttcagcaaatacatgctgaaaaacttctttgaaaaccaaaaaatcgaaatgccgtcactcaagaaaagcttaaaacggctgttttaagaaggcggcgcttttaaaaaataaacaggcagcatgcctgtttatttttttgttgggcggcttgcttgcatatagccgtcctaaacgaaaacggagattgtgaaaagccacagctggcgagcgatggctgatcaaaaaacttatgaaggaccaggacagttcataacaaacgtggttcgcacatcagcatcgcccagcccttatcagcaaaaacagaaaccaagacaggcggggcgacgtacaccgtcaagaaaggcgatgctctttctgtcattgcacaggaaactggcgtgagcatggcgaccctgcaaaggttgaacagtatcaaggacccgaattttatcaaagtcggccaagtattaaagcagacggactcggccagctctccaacaaaaggcaaaaaatcatcttacacgctgccatcaggcgtttttaaagtgacaagccccttaactaagggaacggccgtgaaacagatccagacagctttggcggctctttattactatccggacaaaggagcaaagaacaacggaatagatggctattacggtccgaaaacagcaaacgcagtcaaacgattccaatctatgtacgggttaactgctgatggaatttacggaccgaaaacgaaagcaaaaatgttgtctcttctgaaataaatgaaacagccctttaatagggctgtaccacaaatctatatatttcataaaaataaagaagtatatagaattgtggttcgcatcaatggtagaatgtgtttgttggaaaaaaagtatttcaaatacttgtaaatttgtataaaatttgaaggataaccttacgaagaaatagtgaaacaacacattgcctgataaacattgtgcaaaacccaaatcctatagttcagttggcactgcatatcccgattttgtgtcattatgcactagatagaaatgattaaaatatcctaaataattcaaaaaaggtgtttacaaccttatttgtatcctatatcttaggaaagaaggaaaaatattcaataaggggatactgacgtgaaaaagagtaaatttttacttaccaccatgttctctacaactatgttgatttccggtttaggattgggatttgggaaaagtgcacatgctgaagggtttccgcaacttactaatgaaaaagtccaaacggaaatacaggaaatgaaagatgccggcatgacaagtgaggaagtacagaaattctatgaaatgagtaaagaagagtatgcatatgtacaagaacatgcagaagacttgtataaggattcccaaaaagaaatcaaagaattgaaagcctctggtcaaattgatgaagttcttcctaaatacaaggagcctgaatatcagcccaagaaccaaattgcagcaaaagcgttaggtacaaaaggtgatgttcttacaagctatgaaattaattctggaagttggtctattggtgtaggacatgctgcgattgtttcaactaacaaatcaaaaacagttgaagcatgggcgaaaagctggagccctataaaccaagctggagttcgcagatataataataactggggaagtaaaaagaaagtttatggtctatgggttaaaggatcaaataacaataagtatataaacgctgcaaaatatgcggaaaagcaagcagataataaaaagaaatataatttcaactttttaaataaaaagacaactgctaaattttattgttctcaattagcttggcgttcttggaaaaaccaaggtattgatattgacaatgtcaaatgggacaccgttgtaacaccaatggagcttgtaaaatccaataacacaacaatcttttatcacaagggttaaacaaattgacaaaaacaatcggtgctgcaccggttgttttgtcatttcaaagggaggaaaatatgaatagacttaagaccctgttaattttcatttgcatactgatagtcacaacctcttgcggtctcatcccaactgggaatgaaaaagaggaaagaagcagcaatcaaaagactgtattaaaggatattgacaatgcaaaatttattgttggtttttctaacactttagataggggaagtgagattggggtttacggtgaagatggtattaaaatggatagcttggaattgaaagatggtataaatttcacgatgtcttcacataacaaaaataatacgttcttctcatcaaatagaagcaataatcacttgatgatagacaataaaaccggaaaaataaacaaaataaatgaaaagagtttgtcaaaaacaactgaggatgaaggtgctttctttataaatagttctgacggttatatcatccatgacattaacgttggatatacagacaaagggctggaaagtgaactggtatattggaagggaaacagccgaaaaaacaagaaacaaataaagcttgacggagaacttggatcagcaatcgtcgctaaaaataaaatttatgtcatttcaagtgatgaagaaagtatgtccatcctttcaattaacccagagacaaataagcaagagaacaaggcatccataccgaataaagggatatacttcatggatgaaaaggatgcattccaagctctagatgaaaatacatttgtactggcagttaatgataacgtgaatgagaaagagaattctaagctcatattaatagacagagagactcttaaggtaaaaaaagaagtcgagatggagaaagggtttcatcctgcaaaattgaaaatattaaaagatagcatcttagctgtttcttttgaggggaagctgcaggtgtttgataaaaaaatggttaagaaaaaatcttttgatttttatgctggggatgataacaaattaatgaatgatgttcaattcaatgacagagagatgtatgttttactcaaaaactttgatatccagcgtgataacaagcttggagatatcacgtcttatgatttgaaatcaggcaaaaaggtaaaaacaatcccgctaaaagcaaaaaaagagtgggaaattgcccggttcgaaattttaaaataagtaggaggtgtttatattagcccgtttttgagccctgcatatatcatactcattattcttccggcagcttcttttatgctggggataatagggtatttcatctttaaaaaagtatggactatggttgtcgtcgtattgatcctgtcattgatatttatgtttgttgtgataggggcagagccaacatttttaatttgggtgtttatcatgacgggagcctgccttatctccggttcaatcactaagactataatgaattttacaaagcgaaaatattaaatggaataatcaagagtgtacatcaaaaccataatcccaaaaatcccgcgacgaaaattgcgggattttttcgtttgtgtttattgtaggaaaagttataatattacaaaaatagtgattagagggagggataagtgtggaccaagttttaccgtcgtcccaagttggtgtcaagatcaatgaatggtacaaaatgattcgccagttcagtgtgcctgatgctgagattttaaaggctgaagtagaacaggaaatagaggagatggaagaggatcaggatttgcttgtcttttattcattgatgtgctttcgtcaccaattgatgttagattccttggagccggaagacagatatagagatcgccctacagtcgacgaactgcttgaaaaaatagaaaaaccacaaaaaagacttacaggcctcttgaaatattactcattgttttttcgtggaatgtatgaatttgatcataaagagtatgttgaagcgataagctattatcgcaaagcagagagagagttgaatgctgtatcagatgaaatggagcaagctgaatttcattacaaaatagctgatgcctattatcaaattgatcagcactttgtttccctcaatcatttaaaaaaagccaagcaattgtttgaaaaaagtcaactatacaaagtgaaagtgattggctgtaatatgatggtcggtgctaacatgtacgatatgtacaggctgacggaggcagaatcatattatcgggaagcattaagtatcgcccgtggcttggatgaggaaaaagtgaaaagaattatcggagtgatctttcataacttaggcttagtttatttaagagggaaaaatttgattgctgctgaagagaatttcaaaaaggcaatagacgtgaaagaacatattgatacagtgtatggagtgagatcattatatatgatggcgaatgtcctgtaccaatgtgataaagccaaggaagcacgtttcttttatgaaacggctctaaatcgtgctcggacttctaatgaagaagaatatttggctaaattaaaaatcattaattcattacacgaagaatataatgaaacagaagtgaaacaaagcttaggttacttggaaaagaaacgcctttggtctgatttcgcagagctaaccgaaaaattaggtgactttcattttgagaagagaaactatgtagagggaagaaactttttaaagaaaaccatacatgcccaaacacaaatacttaaggttacggaggctatataatgaagaaacttataatcagctccgctttaatcggtattctttttactggattattaagtgtgacaaatgtttatactgctgaaatgagtgactctggaactttttatatcgctgaaaaagctataaatatttaagtgttctccaatttttgacctccaccttttaagactgggggatttctttttcttatccagtaatcaacatacgctgcctcataaggttcttaaccgttacttgtattgcgttcacctttccgttttgctgtgaagtgttttcttgaacgatgcatgcatgagaaagacgccgtccatttttaagcctatcttcaatcattcaaggacaaacaaaagagctatcgagaagatctcgacagctcctttgtttgttgagcggcttgcttgcatatagccgtcctaaacgaaaacgatgattgtgaaaatcggcagctggcgagcgatggctgatcaaaaaacttatgaaggaccagtgcaattcatctcaagaacagccagagagcggtcacaacagcgatcataaagtaatctccctcattcagtgtagttccatttttgacaaacacaagtgccgtccggtttgtctttgtccctttcggggttttaagcgcaatgttcttccctatattgtaataaacaattttaaacaaataatacgccagcgaacagagtaaaaagagcaacatgaacttgccaataaacaatatcatgtttcattactccctattgcagttttttcgtatgaatatatgacggaaaagtcaggatgttatataaaagaagaagtattttaaagaggctggtgttattcattaatgaatggctcaccgtaacatctctagatccggaatcatttcaaaacgaaagagaagcccgaggattattaaaaaacagtccctaatttgtccgcttatttttgaacatttgatccaagatgaacataaagagggtgaataagaaggacaccgtaatcatatctatcagaaatatattagaggttctttttattaatagcagccataccacctgcaaaactaaagaaatagaaaaataggatatatatgtcatgattctcatatttgttacccccttagcctaatttctcttttgtgatcttatccaaattagtgaaaaggatatccaatcccgaaaataagaaagtgatgaacaatgaaagaagaatttctccaccttgaaatatagatatgttctcaatgatatgattggaaacgtattggattgagaagtaaacagcagcccatgcaaaaatgaattcaaggatataggctgaccaagcaggtaatgtcaaaacatgagtcattccttttacaattgccgtaaggattagcatataaactaaagctaagatactgacgacgacagaaaatatgtataagtctgaaagagaatcatatatgatgtaatctccgaaaaaatgatgtattgttacagctgcaaaacaaataatcaggctggggacagtcacagcgaagaacagagagaatccaataagtacgatgaatgctgcatgagctaagcggttgggcggtgtatccacgatctcttttttaaatagaatcataaaaataagagatgaaatcacaaggcagcataagaaagtgagcaaaacagtaaaaaagacagtcattttgacatctccaatgaaaaagtgctattagagtgaatctaacagcactttgcattacttcatacgtattttcctgatgatcatttatgaatgattttaaaatgctttcattgctaaagttgtcaaatgagcgaggtttttagcctggctgtcagaaagtccggactttttaagtgaaagataaagattcttttccacgtcagtccagcttaaggcgacatactcgttcagcattttctttaaaaccggttcgatgtgttcattgaaaacggactcgagttcatttcttattttctttcctgctaatttttcaacaagattgaataattttgttttatttttcagcacttctctgattacatctttgactggttttgacacagatgcatcgctttgtgctttaagtccgtaggaaaattgcgtatcagtctgataaaaaaatgattttgtcgttccagtggcattggcagtattattatgattttctttagctaaggatgcggggacaaaagcagtagttacaagggctaaagatgcggcaaacagaatgcctttagctgcgtgtctaatgggaaatcctcctttagaaatgtagtgtagagagaaatgatagactatgtatttaggcgggaccgatatgatccgctttgaacattttcccctctcagataccattctatcaataggtatttttggggtaaataggattttaatacagtatttttcttataattcaaaatcttctttagcaggattcattttggctgcagtttcgacgagatgggacttgggctggagcctatataacacatgtacaggctgattgaggcggaatcacattatcggagcggttttataatttagggttaatgaataaaaataaacaggcggcatgcctgtttattttcgtttgcgtgaaagagcgaagaaaaacgggaaggcggagccggccaataacgtaccgaataaaaacatgcccccgatgaacacatgatagttcaccccgccgatccaaagccccgtgattaaggaaacgatgcttaatgcgatcatgaaaaagccgggaatcagacgtttcttacccgttgtccgataagcaaaaagagaacagaagatgccgatgacaatcggcacaatccacagataaaaaaggataaatactgacataagcaaaactccgatttttcttctatcataccaaaaacgcccggaaaaagatacgaacggcacccggcgtcaaaagaaaaaccggccattgcggccggtttttttctaacggaatgaatcgtagatcacaaacagattaagcgcgatcaccaaaaccgcaatcagccaggcgagagccgtcacccattttcggttcgtcagggcgcccatcaggcgtttgttgcttgtaaacataatcagcggcacgagcgcaaaggagatgccgaatgaaagaacgacctggctccatacgagcgcttctgtggcgttgacccccgagataatgatgatcatcggcggaatgatggtaatgaaacgccgcaaataaagcgggatacggtaacggatgaagccctgcatgataatatcgcctgacaatgtgccgacagaagagcttgaaagtcctgcggccagcagcccgatcccgaagagaatggctgaagccggtccgatatagtggccgaattgctgataagccacgtctaaatcttctacatacagcccgttcttgaagaaaagcgcggcagcgacgatgagcatgcttgcgttaatcgccccggcgatcaccatcgcgatgagaatgtcaatcgtctcgaatctaaaaatctttttccgctcactatccgtttttccgacgacacggcgctgtgtcagtgcggaatgtaagtaaatggcatgcggcatcacggttgcgccgagtatcccggttgccaagagcacactgtccattccgtcaattttcgggataaacagcccctcgagaacggaggcggcgtcaggtttggcaaagaaggtttgcagagcgaaggcgatcaccacgacgaacagaagtccggcgatgcccgcttccagcgcccggtaaccccggcgctgcagctctaaaatcgcgaatgatccgatcgccgcgataatggccgcttcaaccatcggtatgccgaacagcaggttgagtccgagcgccgccccgataaattctgccagatcagttgccataatcaccagttcaccctgtatccacagcccggctgatacccatttcggataccggtctctggcgatttccggaaggtttttacccgtggcaatgccgagcttcgcggaaagaacttggattaaaaaagccatcaagtttgaaaagaggatgacccacagcagcatatacccaaatttcgaaccagctgagatattcgtagcgaagtttcccggatcaatgtaggcaatcgccgcgataaaggctgggcctaaaaaaggcagaagccgcttgaatcccttgcttttgccgtcaagtgcatcctgcacggcttttgcttgcagtgattgtgctgagatgtctttgctcattatgtctcacctaaattccgatagatttttagctaaataacaaaaagtttcctagatgcaaattattttatctacatcataaatccgctattataagatgtcaagttctttatgttcaataaaccggcacattgatgccctgttttatctatgatatgtatcccgccgaagaaaggtccgaaaatgaaaacggcatcattccgggaaagaagcgatgccgttcgcaaagcgtgtttccgcgtccgatcatgcgcggatgcgtggagcgttcttttaaaaaggtgaaaagaggacacttgcccatatcacttcacaactttctgtccgcccagctgatttgagaaaaagacgctgtatttcctccgttttcccgggtaaatagaataataatgtttctttccattggaagataaaacctttctgtaccattcaaatgacctccggaaaaactccggccgctctgaataaacgtttgaatcaacgatatatcagtgattccagtccaataaaccgctgttatctatcaaaaaaaagaatcggcatggtcacttgcgaagaaaagaagttggagcattagacttatttcagtctcccgggcgaaaaagtataataacgtcaggaaagctttccggccatatgataaaagagggggaattttcttggtacgtcgtttgtcgatcatttctttagccatgatttttgctgtttctttattcgcttttggcggctctgcatcagcagcagctttcaaacctaaagctgaaccggacgtttccattttagccagcgggggcacagtcggtatttacggtgctaatatgcgctcatgctctaaggtcagctgttcaacgatcacaacattctcaagcggtaaaaaaattacaggttcttgggtaaccggagaatatgttcaaggccactacaccaattctaataaatggctgaaagtcacgtatgcaggagcgacaggctacgtttcagtcaccacactatcttattattacggtttataatcagaaaaacctcgttctcttgagagcggggtttttcctttattccgattcaatttccgcgtttcgtttcatcatcgtgtttcatcagctgatcgatttcttccttagaagcgttttttttccactctttcgcctgacttgtcgcaatgggaatggcccgtccttcttcataaccctcatctaccatcgcattcgcgatttcgatcgcttttttcttcacaggttcctcgagattcttcaatgattgcggataatccttcatagaccaaggcatgtctatcactcctttatgaaaagtgtttcccgcctgaagaaaaagaaaaccgccttatcaaaaagaatgacagctagttttacgagagaccagcaatttccgaataaaatataaaggataaagaagcaagtacagattgaatgcccaccacataaaatcaaaatcaccgataaatacccaaaaggcaatcgcttgcaggcctgaacaaaaggtcagcacaagtgatattaatgcgaaagagcgccataacgcatgtttccgtttataaagaaacaagctgtacagcccggttatcgaaatgaaaatatctaagggaaagaatgaccagttccaggccatgatcatggcgttatcataatctttaaacaccatgttttttggaatccactcaaaaaaagtaacaatccaataaacgataaaaccaatatctgtaatgaggaagagaacctttaaccctttcatcatctgtttctgtccgtatgaacgctgctgccgtttaatgacgtttcactttcagaaataaagtttaaggaaacaacaccgatgatgatcaaaagaacagagacagcttttatgacagagaactgttcatgaaagaaaaaaattccgatcatggaaatcagcacgatccccattcccgaccagaccgcatacgcgatggagacacttatatatttcaaagtcaaagtaagaaaacaaaggctgccgatataaaacaataataataaaatacttgggacaagttttgtaaatccatttgataatttcatgctgaccgtacccaatacttcaaaaatgatcgctaaacttaaataaatccattgcattcaacattctccttcaatcgtattattcaaaattatacaatatacagaatttgaagaaaattaaacaatggaatgttttccggataaaaaattcggccgggtgtaaaaagaaaacgccataaaggtatactatgaacaaagaaatcagaaaggacgtgcaggacgggtgacagaagagcggacagacctggaaagacaactgagagacattcaaaaatgggaaaaggcgcagcagagggtgatgttctggcaaacattcacccgcttgccgtttcagcttttggacaagctgacaccgcaatttattcagaggaaaatcggactcattctcgatgaaacgggaacgtttattcagtcaggcggacagtacctgacatcagaaaagcgcatcacgaaaaagtttcaaaaacggctgccgcacggtacatgtcaaacgcttcacgacatccgcattgcgccgcttgccgtcatggacgaaatcgcagaagccatagcgcgtacaagcgtaaaggccgcgacggtgcagggagccgcaacgggagtcggcggcgtattcacgctggcggcagacatcccggcgatgctcggcctgtccttaaagacgctgcaggatatcgcggttgcttacggctttgatccgaaagacaaaaaagaacgcgtgtttatcgtcaaattgctccagcttgcatccagtgacgtcatcggaaaaaaagcgatcctgcaagatttacggcaatatgatcaaaacgaccgcgcctatcagcgcgtcgcctcgcaaatccaaggctggcgggaagtcgtttacagctatcgcgatacgttcgccgcgaaaaaactgctgcaaatggttccggccgcaggcatcatcttcggcgcgtccgccaaccgttcagctttagaaagcatcgcggaaacaggcatcatgctctataaaaaacgccggattctaaaacgcatgaaggatacagaatgataaaaaaccacccgaaaacacattcaatgtgttttctttgtttagcagttctgaaatcgggaaaccaacaaccaacaccaattaaaggaggaattcaaaaatggcacaagataataacaaaatgagcagagaagaagcaggtcaaaaaggcggagaagccacaagcaataaccatgacaaagaattctatcaggaaattggtcaaaaaggcggagaagccacaagcaaaaatcacgacaaagaattctatcaggagatcggtgaaaaaggcggagaagccacaagcaaaaatcatgacaaagaattctatcaggaaatcggtgaaaaaggcggagaagccacaagcaataaccatgacaaggaattctatcaagaaatcggccaaaaaggcggagaagccacaagtaaaaatcatgacaaagatttttataaggaaatcggccaaaaaggcggaaacagacgaagcagctaataaaagcataaaaggtagacaacctgcagatcaaaagcgatccggcgcatcagctggatcgctttttattttggggaaatcttgatctgagccgccgttgcgatacaataaaatgaaaaaggggtttttcactcgtgtctgacatgctgaatttgctcgctatcgccaataaagtcaaagaaaaacacgacaatttttcaatcgcggagatcaatgaccactgtgtgcgcctcgcagtgtttacgggagaatatgactggcaccatcaccctgactcagatgaatggttcatcgttctggaaggggagctgctgattgattttaaggacaaagaaaccgcagtgctcaaggcaaatgacagcctgctcatcccgaaaggcacgattcaccgcacccgctcttacgtcagaaccgtgaatctttgtgtcgagcatacgcatgcgaaaacagtcatcacagaggaattgtcatgctgatcaaaaagattgtatgtgaaacagacgctgcaaacgctgaagcatttgcgcaagcacagtcaaggtggggagcattatcatgtgtaaatggcttcgtcaaacaggccggcggctggcggaaaaacgcagacggcctgttcatcgcggatatcatcagcgtttgggagaacagacaggcctatgatgattttatggagaacgaacatgaccgcatatacgaagaaaacgagcagaaggcagcgattctttcaatagaagtgatgctgtatgaagaggatgaacctgtcattcacgagctgttacatcacccggacatccgatacgaaccggactggacggttcagaaggcataatgaaagcccaaaacagtttgttttgggcttgtgtctttactcgcgtccgggaagcgtgttgtggacatacggcgggacaggatccagcttagctatttcgccgtgcgctttcggttccttttcgtattcaaatggttctccgtccggcgctgtttccttcagccaattttgttcagcgctttctccgccatctgagaaatgaataagcttatgggagaatgactgtttttccagcgccttcgggaatgtggaaggaacgatcggaccttcctgttcttctaattctttaatggccgcaagccattggttttgatgcatggtatcgcgggccaataaaaagctgagcatatctttcacgcctttatcatcggtcatttcatacaggcgtgcgacttgaagccttccttgtgattcggcgttcagattggcgcggaagtctgccagaaggtttccgcttgcgacgatatagcctgcgctccacggaacgcccgtgctgctctccggcattgcgccgagtcctgagacaattgcatgatgcggattcatcccgcctaaaatggacccgatgaccggatcatcagccgcttgttcctgctctgccagcggggcatcttctaacaatctcgcaatcatcgtcgcgatcatttcgacatggccgatttcttccgtcgcggtatccatcagaagatccttatatttttcattgccccgtgtattccatccttggaacaaatattgcatggcgacggatatttccccgtattgtccccctaaaatttcctgcatctttttggcgaacagcgggtcaggacgatccggtttagccggatgctgcagttttttcgtatgtgtaaacatgtctccatctcctttttttgctctgtccctatttacttccccggcgggaaaagggatgaaacggagatgggcgtattggtcctgctaaggctcgcggcgcaaggataacaaatcctgcacaagcccgcggccgatcacctgttcatattgtccgtaaatcgggtcgaggcgtttcatccatgtgttcttttccgttttgctcagcacatgaatatgaatggatgaattcttctttatctcttcaagctggtctttattcattttctcagcggaggcttcgttccattccgtcgtttctctcatcgcctccgttaagatggttctcgttttttctgtctgcgaattccagaaatgctcgtcggtcatcacggcataaccgaggtacccgtgattgctgattgtcaaataatcttgaacattataaaattttttagaatagatatttgaaatcgtattttcttctccgtctacgagattgctttccaatagctgaaacgtggaattaaaggaatcctgccgcgggcgcgcgccgagcagacggtactggtcttcgatcacgctgctcggcatgatcctgagcgcctgtcctttcaaatcgtccggagtgaagatcggccctttatttgacgtaagctgcttaaacccgttcgtccagtacgccagtcctttcaaatgatgcttttctaatgaagcgaacaggcgtgtgccgattttgccgttcaggccttcttgcacggctttatagtttgtaaacgcgtacggcagatccaaaacaccccattcgggagacagtgatccgagctttgaggtggagggagcgatgaattgcacgtccccgttttggagggcgtttatttcttcattatctgaatagaggctcccgtttggaaacacctctactttaatggtgccgccggacttttgatagaccaggtcggcaaacttattcgccgcccgcccttttggcgtgttttcagcaacgacatggctgaatttgaaaacgatttgatctttcaggccttcctgttcgtcatcataatacggttcttccgttgagaaacgatcatgaaagccgatgaataaagcggttccgataccgagtaccatcaggctgagacaagtcagcaagcttttcatcgaaaaccccctccgccattttctataacaagcataatcgggcgggccgttttcgtaaagagacggaaaggaagaggccaatgacgaaaaaaaagctcaccatccgctggaaaatcaccatactttcgtatatcgtcgtgctttttacctttttgatcgtcggcatcgtgctgatcggcaatattcagcatacagaggagcgcgagctgaaaaaacggctgatgaataccgcgcggacggtatctgagatgaccgatgtcaaacgcgccctcgagcagaaaaaacaaagggaagacgtgcgccatgcggtcgaagaaataaggatcatcaatgaagcggactacatcgtcgtcatggatatggatcatatccgctattcacatcccgtcagcacaatgatcggaaagcgttcaaggggtgaggacgaagccgcggcgttcgccgagcacatttatttttccgaagcaaagggagaaatcggcaccgccgtccgcgctttttatcccatcaaagaccgggatttgaatcagatcggcgtcgttctggccggtaaaacgctgcccggattcggtgaaattcttcttcagctgaaacatgaaatactgtttatcgttctgctggcgctcgggttcggactggccggctcctttttgctggcccgccacatcaaaaaacaaatgttttggctggagccccatgagatcgtgagaatgtatgaggaacggaccgctacgtttcattcaatgaatgagggcgtcatcgcgattgataatcagcatcacatcaccatttttaatgaaaaagcgaagcagatattcaatgtcagacaagaaacagacggcaggctgatctgggacgtgttaaaagattcccgcctccctgaaatcgtcgagcggaaccgagcggtatataatgaagaaatccaagtcagcggaaaggtgattatgagcagcagaattccgatcgtcatgaaaaagaaggtcatcggagccgtcgccatttttcaggacaggacggaagcggcgaaaatggcggaagaactgacaggtgtgaaaaattttgtcgatgcgctcagagttcaaaatcatgaacatatgaacaagcttcacaccatcgcgggactgattcagctcggaaaatcagaaaaagcgctccagcttgcttttaaggaatcatcagaacaagaaagtgtcaccgattttcttcatcaggccattcagaatgacgctgcggcggggctgctgttaagcaaaatcaaaagaggaaaagagcttggcatttctgtgaaaattgatgaaaacagcagtttctcggcatttccggagcatgtcgaccagcatgacatcgtcgtcctgctcggcaatttaattgaaaatgcgttcggcgcattcgaaacagcggacacggaggacaaacatattgacatcagtatcgagcaaaatgatgaagtgcttgctatattaatagaagacaacggaagcgggatttccgatcagcacatcccgcacctttatgacaaagggtttaccgtcaataaaacgggaggaacgggatacggcttgtacctcgtcaaacaaatcgtcgacaaagggatgggcgttattgaagtcgacacacggcagggacagggaacggcattttctattttatttccgatgaagggggaggaatcattcgatggacatcaaggtgctgcttattgaagatgatccgatggtgcaggaggtgaataaagaatttatcaccggtgtttcagggttcagcgtcatcgccacagccgctgacggagacgagggaatcaggcttataaaagatctgcggcccgggctcgtggtattagacgtatacatgccgaaaaaagacggaattaaaacgctccaggaaatcagaaaacaaaagctcgaagtagacgtcatcatcgtctcggctgcaaaagacaaagaaacaatccagcttatgctgcaaaacggtgcggccgactatattttgaagccgtttaagctggagcggatgagacaggcgctcgaaaactataaacaatataaacggaaaattgaagagcatgacaccatgtcgcaagagcagcttgacatgctgcttaaaattccgcaaaatccgtcccgcgatctgccgaaggggttaaatcattttacgatgaatgaaattttgacctatatgaaacagcagacggagccgctttcagctgaagaagccgccaaagcgctcggaatcgccagggtgacagcgcggcgttatcttgattttcttgaaaaagacggccagattaagctcgacattcaatacgggggagtgggccggccggttaaccgctacaaattcgtccgctagccgagaccaaaaagaccaaaatgtccgttatgatcataagcttcccctcttcgtttgaaaacgctatcatttttgtatagacgcagcgagaggcaagggggagtagggatgaaaattttcaaaaatcttacggtgcaggtcatcacggcggttatcatcggcgtcattgtcggactcgtatggcctgaggccgggaagcagatgaagccgctcggcgatacatttatcaatgcggtaaaaatgattatcgcaccgatcatattcctgacgatcgtgcttggcatcgccaagatgggagacatgaaaaaagtcggcaaagtcgggggaaaagcatttatttattttgaagtcgtgaccaccatcgcccttattatcggacttctggtcgtcaatatcatgaaacccggtgaggggcttgattacagcaagcttgaaaaaggggatgtctctcagtacacgcaaaacgggggacaggggattgactggattgaatttatcactcacatcgttccgtcaaatatggttgacgctttcgcaaaaggcgacattcttcaggtcttattcttttctgttttattcggtgtcggcctggcggcgctcggtgaaagaggcaaaagcattattgatttcttcgataaactgtcgcacgtttttttcaaaatcatcggctacatcatgcgcgcggcgccgatcggcgcattcggggccatggcctatacgatcgggcacttcggccttgattccatcaagccgctggcgagtctgatgctgtctgtatacgttacgatgttcctgtttgtatttgtcgctttgaatatcatttgcaaactattcggtttcagcttgtggaactatctccgttttattaaagatgaactgctcatcgttctcggcacaagctcttctgagtccgttcttccgcggatgatggataaaatggagcgctacggctgttccaaatcggtcgtcggccttgtcattccgacgggatattcttttaacctggacggcacctcgatttatctgtccatggcgacggtttttctggcgcaggtgttcggcgttgaccttaccatcggccagcaggttacgatcattctcgtgctgatgctgacatcaaaaggcgcggcgggcgtaaccggaagcggatttatcgtgctcgcctccactttatcggcgcttcaggttattccgctggaggggctggcgctgctcctcggcgtcgaccgctttatgagtgaaggaagggcgatcgtcaacctgatcggaaacggaatcgccaccatcatcgtagccaagagcgaaaatgagtttgacgaagcgaaaagcacacaggccgttaaagaaatgaaaacggcggtataaaaggaaaggaacggcatgcatcgggcatgccgttctttttttcggccgccatgagtaaaaaagataaatttgtttaaatttattaggaggtggacaaagaccttagcgtcattttgttatataatttacaattagagagtgaaagatgaaatctaagggctttttgtcctagcaggagtgtataaatggcggctatttttaaattttttcagcatccgggtgtcagacgtttttccgtttttcttgttttgactggggtgttagttgtattccgaagtatgattaatttgattttgcttacgtttatttttacttttctgatggatcggctggagactgtcatccggcacgtgttgaaccattttttccggatcagccagagggtggtcatcaccgttttatatattgcgctggctgtcggggcgactgtcggaggctttgtcttttacccgattgttgccaagcagattgaacagctgattaagcagatcaagcacatcgcgtatcatcccgatgtcatcccgttttatgatgagatatcgagcgtgttcggcgatatcaatatcggttcctatgtaaaagaaggttttaatgtactgtatacatacttggccgatatcagcactttcggtttgcaggtcgtgatgtcactgattctcagcatgtttttcctgttcgagaaaaagcggctcacggagtttatgaaaaaatttcagcacagcaagctgtctgttttttactacgaacttgcttatttcggcagcaagtttgcgagaacattcggcaaagtgcttgaagcccaatttattatcgcgctggtgaactgtatcctcaccttgatcgcattggcgattctgcattttccgcagctgttcggcctgtccatcatggtctttttcctcgggctcattcccgttgcgggtgtggtgatttcgctcattccgctcagcatcatcgcgtatacgacgggcggcgcagcgtatgtcatctacatcgtgctggtcattttcgtcatccatgcgattgagacgtacttccttaatccgaaattgatgtcagcgaaaacggaactgccgatcttttttacctttacagttctgattttctcggaacatttcttcggcatttggggcttgattatcggaattccgatttttgtgttcctgctcgatattctggatgtcgtcaataatgaagagaaggaaaaaaacggaccggtcccggataagacataacgtcggctccagctcttcacgaatatatgactaatgttataatgcagacagtgcctatgtacgggcactgtttattttttgtgaaaaaggaggaaggctgtatgactgagccgattttacatattgaaggccttgacaaaacaataggcaaaaagcacattttaaaaaacatcagcatggatgtcaggcagggcgagatcatcggtttgctcggtccgaacgggtcgggaaaaaccacacttatccgaatcatcgtcggtcttttaaagaaaaacagcggcacgattacaattaacggctttcagcacgatgctgatttcgaaaaagcgcttgaatccgtcggagcgatcgtggaaaatcctgaattctacccgtacctgacggggtgggaaaatctgaagcactttgccaacatgcacaaaaacatcaaagaggacaggcttcaggaagtcatcgagcgggtcgggctcaccaatgccgttcatgacaaagttaaaacgtattcccttggcatgcgtcagcgtctcgggattgcgcaggccattcttcaccgtccgaatctgctcattttagatgaaccgacaaacgggcttgatcccggcggaatgaaggatttccgcgatcacttaaaggaactcgcggagcttgaagggacgagcatcctttttgcgacgcatttattgcgtgaagtggaggacctttgcgaccgtgtcatcatcattcaaaaaggtgagatcaaaacagaggttgttctgcgcggcgctgaggaaaaagaagaaaaagccgtcctcgacattcagccggctgacgaagcattcgaatggctgtcccaacagcaatttgctccggagaaaaacggcgggggcattaccgtcaccgtagcgaagaaggacatcccggcattaaaccgtgcgctcgtcggacaagactttctcgtgtattccatcatgccgtatgcggaatcgctggaggatgaattcatgaaagtgacgacggcgcttcaagaggaggaggagacgaatgtttaaattgacagcgaatgagcatatgaaactctttaaccgaaaagtctcattagtggcgctgattctgatggccgttctccaatttattatggcgcttgtcattaaacggcttgtcatcagttccggaacggatgagaatttcatcggctatatggcgtacgcgcccgggctgaatattctgcttgaggcattaacgatcgtgatcgcggcaacgatcatttccgctgaatttgataagaaaacgatcaaatttttgttaatccgcccggtaaagcgggagcggatttttgtatctaaactcattaccgtatttttggtcagcttgtacctgtatgcggcgtactatattctgtctctgctgttcggcatggctttcttcggcgtgtcggtgacatctgaatcagggacgcttcttatgaacaccctgaaagtaatcggcacgaactgggtcgaggcgtttgcgatggcatgctttggcttgctgtgttcttctgtattccgaaacagcgcaacggccgtcattttgtcatttatcgtgctgtacggcgcaaaatcactcgtgacgattatgtcgctcttccaaaacaaatggggaagttttctgctgttcgcaaatactgacctgacgcaatatatgagcggggcgaaaccgctgtttgcgggaatgacgccgttattttccgcaggcattatcattatccatatcgtattcttcttagccgtcgcttggtggagcttttgcaaacgcgatgttcgggtataaagtaaaggaatgacatttttgtgaaaaagatcacgataaatcaataatttatgctattttgatttataataaaggtaatgacggaggtgctcacttgagaaattttattaccgcattaccgattgtgttattgcttggtttttcctttgtgtcattcatgttccaattcgaacatcttgtttatttcaggcttgcgctgggtttgttttctacagtggggctgtttctcttatataaaatgaaatcgggattccgttatttcatcatctacctgtatgcaagctggatcgtgcttgcggcagttaccgcgtttgaagagccgattttttcaagctttttctttggcgggcttgtgatgacgatgggttatctcacatatatgctgatttatctcgggcttaagcaggaccgcggcccggaagcagtctgaacgcgctattccatggaatagcgtgttttttttgtacagcctcacagttgcgaaacgagacttgaatctctataatacttattaactttatcggaattataatggggggattccagtgtctttatggatacagaatgaacggcagagggaatggatggaaaaaatcggcctgcttgcagacgaatttcaaaaaacagccgcgcttgatgatgaggcgggccgttttcccgctgagaaaattcaaagactgcgcgacgcgggatatacggcgttaacagtacctgaggcattcggcggtgcaggcatttccgtttatgatatggtgctgtttcaggaacggctggcgcggggagacgcggccgttgctctcggaatcggctggcatttatccgtcatgggtgagctcggagaaggaaacagctgggatgaagatgtcttttcatttatcacagaagaggtgaaaaagggagctgtcctgaacagggcagcgacggaacggcagaccggcagtccgacgaggggaggaagacccggcacctccgctgtcaaaaaagacggaaaatgggtgctgaacggccgaaaaacctttacaaccctttcactgactttggattatatgcttgtgacggcatggattgaagaaaaacaaacgaccggtgtttttctcattcataaagatcaggcaggcgtttcagtcgaggaaacatgggatatgattgccatgaaggcgaccggaagccatgatctccttttagatcatgtcatggtcagtgacgagcggcttgtggagcttatcagcgggccgagagcggcgaaagtgaatggctggctgcttcacattccggctgcttatctgggcatcgctcaagcggcaagggactatgccgtccggtttgcatccgaatattcgccgaacagcctgaacggaccgattaaagacgtgccggccgttgggcagcgtgtcggggaaatggagcttgaattgttaaaagcgagacagtttctcttcacggcggcgcaaatgtatgatgacccgaaacgccgtcctttcatcaaaagcgagcttggcgccgcaaaacatattgtgacaaatgcggtcctttctgttgttgataaagcaatgagaatcaccggcgcaaaaagcctggagcgaaacaatccgcttcagcggtattatcgggatgcccgggccggccttcacaatccgccgatggacgatgcggtcatcggcaaattagcggcggaagcctttgagcaataaaaaaaagagcctgaaaaaggctctttttatgtatggctgttgtgccggagcagtttttgatgcttgcggtcaattctgtcatagatcacattcatcagcttttgattattcataatggccgccttgttttcttttatcagctgttcgtatgtttttattttacgtttcgccatgagcccgcaccttcctaacatatttgtattcgctttctaattctccgagcgataattcatataaatgccgttccgactttttgtatattccgttattgatcagcaaatggatcagatgtttttttcgtccttcaactgatgatctgagctgaggagaagacctcatgattaccctcctaatcaaatgatattgagaatcattatcagttaatgaaagtatacaatgggcatattcatatgtaaagggaaaataccgccaatttttcgacaaaaagtttcccggggaataatgctgtcgaatattgcacttgctcagatcaaagctgctatttttccgcttttccatccatactatgaatgagaatggaggagtccttacatgaatgatcaaacggcaaacttaaaacggggcgaaaaaggcgcgattcttaatatcgccgcgtacctcatccttgccgccgtcaaactggtgatcggtcttatttatcattccgaagcgctcagagcggacgggttaaataatgccacggatattgtcgcatcactggctgtgctgatcgggctccggatatcccagcgccccgcggacagtgatcatgcctacggacattatcgggctgaaacaatttcttcattaattgcgtcttttattatgatggcggtcggtattgaagtgctgatcggaggagcaaaggcgattgtcagcggaacggaggccgagccgagcttcattgcggcatggacggcgctcggaagcgcgattgtaatgtacggcatgtatgtatataacagccgtcttgcggatcgggttaaaagttctgcgcttcatgcggcggcgaaagacagccgttctgacgcctatgtcagtattggggcgtttataggcgtcttaaccgcccggcttcatctgccgtgggttgatccggtcattgcttttctgatcggaatcatcatctgtaagacggcatgggacatcttcaaagatgcttcccactcattgacggacgggtttgatctgaaagatttggagccgtataaacacacggtgaaagaaataaaagaggtcatcaggctgaaggatgtgaaagcaaggtatttagggagcacggttcatgtggaaatggtcattacggtagatccgggactgtctgtgaaagaaggccatgaagtagccgatgaggtcgaatatgcaataaaacatgaacatgatgtgactcatgtccatgttcatgtagagcctgaagtcataaacaaagatcgtgaaacgaattaaatatgctgtgataaaaactctgtgacttcttcgggcgttttcgcgtttgcgctgtgaagatgcgctttcttttcgccgtttttaaagatcagaaggctcggtatgcccattacctgatatttgtcggcaagctcagggagctcgtctctgttcagttcataccaatcattttgattatattcttccaaaatatcgccgatgaacatattcatgcgcgtgcagtcagggcaccagtcagcgaaaaatttcacgatgatttccttgtcggattgaataagttcattaaattgttctgttgtactgatttttttcatatgacacatctccttttccatgccattttaatataaaataaaaaggaattacatacaaatgctttcatattcagaatgcccaaaaataattagatcattttctgaggaaagtgataagatagtaaagatgaattgttgtggggggaatatccattgaaaacaagtctaggattggtgtacggcggaaagtcagccgaacacaatgtatcgctgcagacagcattagctgtaacaaaagcgcttaatactgagaagtttgatatacatccgatttacatcactgaaaaaggagaatggcaaagaggcccgctgctgactgagccggtttccaacgtgaaaatgcttcagctggaacaaaacggtgaaagtttcgctctatcagcattgaaccgggaaatgtttcctgaagcgtcgcctgacgaaaaggcgccgatcgatgtcgtatttccgcttctgcacggaccgaacggtgaagacggcaccattcagggtctgctggaattgctgaacgttccttatgtcggcaacggggtgcttgcatcatcagccggcatggataaagtcatcatgaagcatttgttcgctcaagcggggcttccgcaggcgaagtacgccgctttcttaaaaaaggactggaaacagacgccggacagctgcttacagcaggttgaaaaggagctgggatatccgtgcttcgtcaaaccggcgaacctcggatcaagcgtcggaatcagcaaatgccgaaaccgtgaagagcttgaaaaagccttcgaactggcttttgagtatgaccggaaaattgtggtggaagaaggaatcgccggcagagaaatcgaaatcggcgtactcggaaatgacgaaccggaatgctccgccgtcggtgaaatcgcgccgaaaaccgacttttacgattacaaagcgaaatatgaagacggcgacacggatttaatgattcccgcgcaagtgacggatgaacaatatgcggaaatcagcgaaatggcgattaaagccttcaaagcgattgacggatcaggccttgtccgcgccgatttcttcctgaccaatgacggtcaagtgctcattaacgaagtgaacacaatgccgggcttcacgccattcagcatgttcccgctgctttggaaagaagcaggtgtagattacagtgatctgatcgaacagctggttgagctggcaaaagaacgccatgccgaaaaacagctgattaaacatacattttaatgaagacggacactgcctgaaggggcagtgtcttttcccgtaacagacaacattttcagaaagcgaggtgccacctttgataaagcgaactgtaaaacgaatcgcagacatggtcaaaggcacactgacaaatcccgaatttgaacaaacaatgattgagggcgccgcaaccgatacgcggactttggaaaaaaatcagctgttcattcctttaaaaggcgagcattttaacggccatacctttgtgccgcaagcattcgaaaaaggcgtttccgcggtgttgtgggaccgctctgaaccgaatccgccggaagggcgtgctgtcatcctggtcaatgacacgctggaggcgctgcaaacattggcaaaagcttatttggaagagctcggcacacgggttatcggggtgaccgggagcaacggaaaaacgacaacgaaagacatgcttcacgccgttctcggcacgcagtaccgcgttcacaaaaccgccggcaatttcaacaatcatatcggcctgccgctgaccgtgcttgccatgcctgaagatacagaaatcgccgttttagaaatgggaatgagcgcgagaggcgaaattgattttctgagccgtcttgctgaaccggaagcggccgtcattaccaatatcggcgaatcccacatgcaggatttaggctcaagagaaggaattgcggaggcgaaacttgaaattataaacggacttcgggaagacggcgttctgttttatttcggggatgagccgctgctgcgcgaaaagacgtacacttgccggacaacgacatacggcgcaggcgcggacaatgatctccgcctgaaagaaataaaacaagcggaagaaggcacgtacttcaatatcgacgggatcgaccgttctttctttattccggttctcggcagacataatgtgatgaatgccatggctgcatacgccgccggcatctatttcggcattacgccggaaaatgccgctctgggactgagccgcctgaaggtgacggggatgagattggaactggtcaaaacggacaacggcatctcgatcgtaaacgacgcatataatgcgagcccgacgtcaatgaaagcggcggtcgaattaatcgaaacgatgaaaggctatcggaagaaaatgctcgtgctcggtgatatgcttgaacttggtgatgaagaaaaagcattccacgaagaatgcggagctgcggtcaatccggcggaaatcgaccatgtatttacttacggcacactcggcgcattcatcgctgacggagcgcgccggcattttgaagaagggcgcgtcagccattatcttgacaaaaaagaactgcttcacgccatacagaaaatggccgcttccggcgatctccttctgtttaaagcatcgagaggtatgaagctcgaagaaatcgttaaagatttattagagaagaactgaaaaaatactgatcagcatcataaaaatatacaaaaatgaagaaactaattcagggtgaaataattctgtccgtatgaaaaagaaagaccgccggctgggaaatcccgtccggcgcggggtccggcctcgttcgcgggaagaatccggtcaggccgcttccggccgcctgaccatctcgccttattgaaaaacacatagtgtaatggtaagattaaacgtaaagtaattcgggctttgtatacgtatgatcctgtcctttggatgaaagggcggtttttagtggtaaatcacgacattactgaaacagcaatcagaaggagtttgaataatttgactataacgtttcaagatttccaattaagttctgatctcatgaaatcaatcaatcgtatgggatttgaagaagcaacaccgatccaggcacaaacgattccgctcggacttttaaataaagatgtcatcggacaagcgcaaacaggtacaggtaaaacagctgcgttcggtataccccttgttgaaaaaatgaaccccgagtctcctaatattcaagcaatcgtaatcgcgccaacccgtgaattagccattcaagtatctgaagagttatataaaatcggacaagataagcgtgcgaaagtactgcctatttacggcggccaggatatcggacgtcagatccgcgcattgaagaaaaacccgcatatcatcgtaggtacgccagggcgtcttcttgaccatatcaaccgccgcacgatccgtttaaacaacgtgaatacggttgtcatggatgaggctgatgaaatgctgaacatgggattcattgatgacattgaatccattctctcaaacgtgccgagcgaccaccaaacgctcttattctcagcaacaatgcctgcgccgatcaaacggatcgcagagcgtttcatgactgagccggaacacgtaaaagtaaaagcgaaagaaatgactgtgtccaacattcagcagttctacttggaagtgcaggagcgcaaaaaattcgatacgctgactcgtcttcttgacattcagtctcccgaacttgcgatcgtattcggacgtacgaaacgccgtgtcgatgagcttgctgaagccctgaaccttcgcggatatgcggctgaaggaattcacggcgacttaacgcaggcgaaacgtatggttgcgcttcgtaaatttaaagaaggtgcgatcgaagtgcttgtagcgactgatgttgccgcccgcggacttgatatctcaggcgttacccacgtttataactttgacgtgcctcaagatcctgaaagctacgttcaccgtatcggaagaacgggccgtgcaggaaaaacgggtatggcgatgacgtttatcacaccgcgtgagaaaagcatgcttcgcgcgattgaacaaacgacaaaacgcaaaatggaccgcatgaaagagccgacgcttgacgaagcattagaaggacagcagcaggtgacggttgaccgtctgcgcacggcgatcagcgaaaacaacttgaacttctacatgacggcagctgcggaattgttagaagatcatgatgcagtgacagttgtggctgcagccattaaaatggcgacaaaagagccggacagcacgcctgtacgcctcactgatgaagcgccgatggtcagcaaacgctataaaaaccagcgtacttctaagcgcagagacggccaaggcggcggctaccgcggcggcaaagggaaaaacaacaaccgttcttcctacgataaaaaacgctcaagcgaccgccgttcttcaggtgacagacgccagaaaaaatcatactaaaacacaggaagcggacccttttacggggtccgcttttttttgatatgccggaaagtgaatcttttttgcaaatcagccgtatttgtatgtatgataaaaaatgggaggtaggtatgttgagagcacagccaaaaaatcgaatcagtccaagcggcttaaaagtctggcgtcttcaggaaatcatcctgtccgccttctgtcttctggccgttatagcagcagctgttttaagccatttcttccattggccgtattggatcaccggagtcctcggcatcatttggatattcggttcagtgatatccgtctatgccataccgaaaatcaggcacaggatctggcgctatgaagtccatgaaaatgaaattgatattcaatccggcatttttattgtcaaacgggtcattgtgccgatggtgagggtgcagcacgtagatacttcacaaggcccgctcctcagaaggtaccgtctggcctcagtcaaaatttccacggcggcaaccgttcattccattccggcgcttgatatggaggaagctgaccggctgagggattccatttcccgtctggcaagggtgacggaagatgatgtctgagccgaaacgtctgcacccggcggccgtgattttgaacttattccatattattatcgaaaccattaaaaacattattctgccattttttctcgtctatattgtaaactccaaccacttcatccgcttttacggaggcattgcgctcgccgtcctgcttatctggctgattacggctagtgtgatcgagtggagaaaattcacataccggattgaggacggagaattcagaattgaagaaggcttgttttttacgaaaaagagatacatctccattgaccggattcaatcaatgaatacgagtgccggcatcattcagcagctttttaagcttgttaagcttcaaatcgaaacggctggcgacgggaaaaacgccgaggccgtcttatccgccattactgtggaagaggcggaacggatcagagcggctgtttttcagcaaaaagcggaacaagaagaacgaggggagaccgcagcggagcaggagccgatgcgcggggaagatgtgcaatccgtttaccgattgtctgtaggtgagctgcttatggccgcctcaacatccgggggaatcggtgtcatcatctcagcggtattcgccctcttttctcagattgatgaagtacttccgatggactggctctatgacaggttttcttttctcaagcatgcgagcatcggtatatacgccgtgatcattttcataggattgttcatcgcctggctgttaagcatcgccggtatgatgatcaagcatgccaactttaaaatagaaaaaaaggaacacgaattggtcattaccagaggaattattgaaaaacatcaagtgacaatcccgctccgtaaaatccaagccattaaaatgaaagaaaatgtgatcaggcaattattcggatacgcgacggtggcgattgtcagcgcaggcagtgcggggaatgagaaagaaggagcacagacgattctgtttccgatcatccgcaaatcaaagctcggagtgatgctgaacggtttcacaccggattacgtgctggaagaaaaccggaatcatttgccgaaaagggcgctgcgccggtatttattccgatccataatcttctcggttttcgtgatcatcccgctttgtattctgtttaagccgtggggatatgcatcgctccttgtgcttcccgtcgaactggtgcttggatatgcctcgtttaggacagcgtcatggtgcataaacggcggcaggcttcagattaccacgaggctggtcgggaagacgaccacgattatgctgagaagaagaatgcagatgtttgaagtcagccgctcctttctgcaaaaaagaaggcggctcgcatctgtggctaccgcagtgaaatcagctcaccacatggagcatgtcatgctgaaggatgtcagcgaggaagatgccgaacgcatcgggcgctggtattcatatgaaaaagcggacggttaataccgccgctttttttgctgcacgcataaaaaggaaagcaaaaatccgcctgccagtccgaacaaatgcgccataatgttaatattagagttgataaacgtcgacagcaccgcgatgataagcagggtcataatcattttcgactgatcccggccgatcagctccttgcggaaaacagtcagaaacacatacacgccgaaaagtccgaagattgcgccggatgcgccgacatgcacataatcaagcggttcggcaagatacgtgccgatattgccgatgatgcccgatgcgatgtacacaatcagaaaacggacttttccgagcatctgctcaagcgggggcgcgaataaaaagagagacatggagttaaacaaaaggtgagtgaaattcgcgtgtaaaaacatcggtgtcaccagccgccaccattctcccgaggaaacgccgtaattatagccggtcacagcatctgaccacatcatgacggaatgaagcggcatactgaaaaacagccacaagaacgcctgcagcgccaagatacagctgacggccggataacgtctgataaaagtctggaaattttccgttcgtataaacatcgcaagcccctttgcatctgatttgttacatatatagtaacacgtttatgacataaaccgttttttagtacggacttttaggaggaattcacatgattttcggaatcggaatcgacatcgttgaactgcacagaattgaaaacatgctcagccggcaggcaagatttccgcaaagaatattgacggaggctgaatacgcccgttttacattgctgtcggacaaaaggaaaattgaatttctcgcgggaagatttgcggcaaaagaagccttttcgaaagcatacggcacaggtatcggcaaagagctcagctttcaggatattgaaactggaaacgacaaagcgggaaagcctgtgctggcctgcgccaagcttgacggcgcggcggttcacgtctccattacccatacaaaagaatacgccgcggcacaggtcgtgattgaaaggttgtcacgctagtctgcatattagccggaacctcttcatatatttgatagtgcattaagggagacaagttgtttgaggcttttatggtacgcgtccgtccgttcagggcgtaccgttaaagtcaaacaagcgatttcttccctttacatcaattgagaagaaggggttgaaaaaaggtgagaaaaagctttgttttgcttttaacgggactgcttgccgtccttattctttcggcctgcggccaaaaatcacaggaagatatcgtgaacggtttagataagaaggcgaaggaatacacctcgtacaaagcgaaagccaaaatgaccatcgaaacggggagtgatccgcaagtatacaatgtggaaatctggcataaaaaaccttccctgtaccgggtctatctggaaaatccgaaaaaagaccaaaaccaagtcattttacggaacgccaacggagtctttgtcctcacgccgtctctaaataagagcttcagattccaaagcgactggccgaataacagcagccaagtatatttgtttgagtcacttgtaaaggacgtgcagcatgacaaagacgccgtctattccgccaaagataaaaagtacacgtttgaaacaaaaacaaactatcagcacaacaaaatgctgccgactcaggaaatcactttcaacaaaaaggacatgagcccgtcgctcgtcaaagtcatggatacagaccggaaagtgatggtaaaagtcgaattcaaaagctttgaattcaacaagccgtttgataaagactcttttgacgagaagaaaaatatgacgctttcccagatggacgtcgccacaagcgccaagccgtctgattcatttgcggtcaaaacaccgcttcaagtgccggccggcgtcaaaaagcttgaagagaaagatatttcaacggcggacggcaaacggatcgtcatgacttacggcggagaaaaatctttcacccttattcaagaaaaagcccatatcgcaaaagccgcctctgccgtcacgctgaaaggcgaaccggttaatctcggcttcacggttgcggcattatctgatacgtctttaacgtggacatatgacggagtggattatcttctgtcatcacaggatcttacaaaagatgaaatggtggccgccgccaaaagcatgcagggacagtcgtcaaaataacgtcaaaaaagaggccgccgctgtcggtctcttttttgattccatttcactttgcagaataattttagtatgataataacaatatgaattgaaaataatgctaggaagtgtatcgaatgaccacagcatccttttacagagaaacgtgggcggaaatcaatctgtccgcgattaaagaaaatgtcacgcatatgaaaaaacacatcgggcaaaacgtccatctcatggcggttgtaaaggcgaacgcttacggccacggagatttggaagccggtaaagccgcgcttgaagcgggtgcctcttgtcttgccgtagccatactggatgaagcgatttcattgagaaaacggggcattacagcgccgattctcgtgcttggcgccgtgccgcccgaatatgtacaagcagctgccgagtatgacgtaacactcacggggtattctgttgaatggcttcaggaagctgcgcgccacctcggaagtgaaacagtgccgtttcatctgaaagtcgacaccggcatgaacagactcggagtcaaaacggaggaagaaatccaaagcgtgttaaaaatcctcagccaaaatcccggtttagtctgtaaaggcgtattcacccactttgctaccgcggatgagaaaaacagagattatttcctcttccagtttgaccgctttaaaacattgatcgctccgcttcctttaaaagaattgatggtgcactgcgcgaacagcgctgccggacttcgtcttaaaaaaggcttctttaacgcggttcgtttcggcatcagtatgtacgggcttcgtccttctgctgacatccaaagcgaaattccgtttcaattaaagccggcttttgcgctgcactctgttttatcccatgtgaaaaagatccgcaaaggggaaagcgtcagctacggcgcaacatatacggcagagaaggatcaatggatcggaacggttcccatcggctatgcggacgggtggctccgcaagctgagcggcacgtctgtgctgatcggcggcaaacggatgaacatcgcgggaagaatctgcatggatcaattgatggtcgaattagatcaatcttatccgccgggcaccaaagtcaccctgatcggcagccagaagggagaaacgatcacgatggatgaaatcgcagggcggcttgagacgattaattacgaggtcccttgtaccattagttcccgcgttccccgtatgtttttggaaaatgagagtataatggaagtaagaaatcctttactgcaagataatacaaacaagtagccgtcatccggaaaaagagaatttataaaacagctttgcttgacgtttgaataatggtatcattatgtctggatggatgaattggtcgtatccgtaagtttggtggaggtgtatgttttttgtctgaatccagcgcaagaaccgaaatgaaaatcagcttgcccgaaaacttagtagctgaattggatggtgtagcgatgcgggagaaacgaagcagaaacgaactgatatcacaagcagtgagagcgtatgtcagcgaacggacgactcgccataaccgtgatttgatgagacgcgggtatatggaaatggcgaaaatcaacttgaatatctcttctgaggctcactatgctgagtgcgaagcagaaacgaccgttgagcgcttagtcagcggaggataatcattttgattgtaaagcgcggcgatgtttattttgctgatttatctcctgttgttggctcagagcaaggcggcgtacgcccggttttagtgatccagaatgatatcggaaatcgctttagcccgactgctattgttgcagccataacagcccaaatacagaaagcgaaattaccaacccacgtcgaaattgatgcaaaacgctacggttttgaaagagattccgttattttgctggagcaaattcggacgattgacaagcaaagattaacggataaaataactcatctggatgatgaaatgatggataaggttgatgaagccctgcaaatcagtttggcactcattgatttttagtcatattttggttgctcatatagagcaactttttttgttttcgaaaaacataagcgctataataaagagataatcaaacaaaatttgttgttttgtgtcgggaggtcagtgaaacccatgtcgaatcagaaagtgtatcagttcatcattgatcagcatgatgaactgcttgatacttggacagccaaactaaaagaagtaggcaatcaggaagactatcagcttacgaatcacatatgtgaaaatatttgtaaagactatatagacattcttttattatcgactaaaaatgacgaggctacggaagagcagatcagtgaactcgcactgcgtgccgttcagctcggcctgtcactgaaacttctttcagccaccctgtcagagttttggaaactgctttacgaaacgatggtcgaccttaatatggccgatcaggacagagcagatttgattttggaaatagacagctttttcaatccgatcaacacggaaatcttaaatcagtattctatctcctgggaaaaaacggttactttgcaaaaaatcgcgcttcaggaattgtcggctccgctgatcccggtatttgagcatgtaacggtcatgccgcttgtcgggacgattgatacggagcgtgcaaagcatattatggaaaatctgttaaacggcgtcgtaaagcaccgttcacaggttgtattaattgatatcacgggcgtgccggtcgttgatacgatggtggcgcaccatattattcaggcatcagaagcggtgcggcttgtcggtgcgaaatgcctgctcgtcggaatccgtccggagattgcgcagacgatcgttaatctgggaattgatttgtcgcaggttattacgaagaatacccttcaaaaaggaattcaaacagcgcttgaaatgacaaatcgaaaaatcgtttcattgggggaataacattgtgagacatccaaaaatcccgatcctgaaactgtataactgcttattggtatccatccaatgggaacttgacgaccagacagctttgcattttcaagaagatctgctgaacaaaatctatgaaaccggcgcaaacggggtcgtcattgacctgacatccgttgacatgatcgattcatttatcgcgaaagtgctcggcgatgtcatcaccatgtctaaattgatgggcgcaaaggtcgtattgacgggaattcagccggctgtggcggtcacattgattgaactcggaatctcacttgaggaaattgaaacggcgctcgatttagagcaagggcttgagacattgaagcgggaattgggggaatagcgatgaacgaccaatcctgtgtgaaaatcatgacagaatgggatatcgtagccgccagacagcttggccgcaacgttgcgaaggaattaggcttcggtacggtggaccaggccagaatcacgacggctatctcagaattggccagaaacatttacttatatgcaggcaaaggccaggtcagcatagaacaagtaaacgacagagggaaaaaaggccttaaaattatagcagaagacaaaggacccggaatccccgacatccgtaaagtgatggaagacggcttttcaacgtcaggcggactgggagcgggacttccgggcgtcaaaaggctgatggacgaattcagcctgcaatctgttgcagaggaaggaacagagattcaagccgtgaaatggcttcggtaggaggttagaacgtggatttcagggaggttatagagcagcggtatcatcagctgcttagccgatatatagccgaattaacagaaacatctttatatcaagcccaaaaattcagccgaaaaacgattgaacatcaggttcctccggaggagattatcagtatccaccgaaaagtagtaaaggaactgtatccggatctgccggaagatgtttttcattcgctggattttttaatagaagtcatgattggctacgggatggcttatcaggaacatcaaagtctgagagatatccagcaggagcttcgttcagaaattgaaattgccgcaaatgttcagcagacgctgcttggcacaaaaattcctgaagaagaagatctggatatcggggcgatcagcgtccccgccaaacagatgagcggggattattatcactttgtcaaagacaaggaatcgattaacatcgcgatagccgatgtcatcggaaaaggaatacccgccgcattgtgcatgtcgatgatcaagtatgccatggactctcttccggagatcggcattcacccctcccaagtgctgaaaaatcttaaccgcgttgtagaacagaacgtggattcaagcatgtttatcaccatgttttacgcaaactacaatacggaaaatcaccaatttacatatgcctctgcggggcatgaaccgggcttctactactctgaaaaagaaaaaaagttttatgatctggaggcaaaaggattggtgctgggaatttctcaggattttgattacagccaatatgaacagcacatggacgaaggagacatgatcgttcttttttctgacggcgtcaccgaatgccgtaccgaaaacggtttcttagaacgcagcgacattcagcgcatgctggaagaacatatggactgctccgcgcaggatatggtcaaaaacatttacgacagcctgctgagactccaggactttcagcttcatgacgattttacgttaattgttttaaaaagaaaggtttaaaaaaacagcagcacgggtaaaaagccattagcacgagtaaggataactttcagaggtgatacgatgaatttaacggtagatatgaaggagaatctttcagatatacaaatcaaaatcgctggagaaatcgatgtatactcagctccggtggttcgtgaaaagctgatgcccctggcaaacgaggggaaagacatgagaatctgcttaaaagatgtaaattatatggacagtacgggtttaggcgtttttgtaggcgtgtttaaaacggtgagcaaggaaggcggctctctgaagcttgagaatctttccgaccggctcgtccgtctgtttgaaattacggggcttaaggacatcatcgacatttcggcaaagtcagaaggtggcgtgcaatgagtacatcagttgattatatagagatgaaaattccggccgaaccggaatatgtaggaatcgtcaggcttacgttatcaggggtcgcaagcagaatgggctatacctatgatgacattgaagatttaaaaatcgctgtcagcgaagcttgtacaaacgctgtccagcatgcatacaacgatgaaaataagggagaagtatccgtgcggttcggtgtgtttgaggatcggctggaggtcattgtcgccgatcagggagacagctttgattttgatcagaagcagcaggatctcgggccgtacactccttcgcacacagtcgatcaattgtcagaaggagggctcggtctgtatttaatggaaacgctcatggatgaagtcaaagttcaaagcaactctggcgtaaccgtggcgatgacaaagtatttaaatggggagcgagttgatcatggcacaaccatcaaaaactacgaaactaactaaagatgaagttgatcggctcatacgcgactttcaaacacatgataataaagaagcccaggaaacactcgttgaggtgtataccaatctcgtcgaaatgctggcaaagaaatattcaaaaggaaaaagttttcatgaagacctccgccaggtcgggatgatcggacttctcggagccattaaacggtatgatcccgaggtcggcaaatcctttgaagcatttgcgattccgaccatcatcggcgagatcaaacgcttcctcagagataaaacatggagcgtacacgtcccgcgacggattaaagaactcgggccgcgcattaaaatggcggtggatcagctgacgacagagacgcagcggtcgccgaaagtcgaagaaatcgcagcctttctcgatgtgtcagaagaggaagtgcttgaaacgatggagatgggaaaaagctatcaggcgctgtctgtcgatcacagcatcgaagcggatgcggacggaagcaccgtcacgattttagatatcgtcggttcgcaggaggaaggatacgaacgcgtcaaccagcagatgatgatcaaaagcgtgcttcatgtgctgtccgaccgcgaaaaacagattatcgatctaacatttgtgcaaaataaaagccaaaaagaaacaggggacattctcggaatatctcaaatgcacgtctcgcgcctgcagcggaaagcggtgaaaaaactgagagaggccttgattggagatccctccatggagctaatgtaatgattcaggttgaagaaaatgaacatgttcaaactcttgtataccaattaaataaagaaggcaagtccatatgcggcgacagcttttttatgaaggcgaatgaagaagaattagtttgcgcggtagcggacggtctcggcagcggatctcttgccaacgaatcctcgtcagccattaaagacatcgtggaaacgtatgcggatgaggatgtggaaagcatcattgagcgctgcaatcaagcgatgaaaaacaaaagaggggcgactgcctccatcttaaaaatcaatttcatcaaaagggaattgacatactgctcgatcggcaatgtccgtttcttcctgcactccccatcaggcgaagtctttcatccgctgccgatttcgggttacctctcaggcaaaccgcaaagatacaaaacgtatacgtcatcatacgaaaaaggggcgaggttcatcatctacacggatgggcttgaggtcccgcatatccgcacctgcttaaagcagggacactcaatagaagatatatcaaaatcacttcatccgtacacaacatccagacgtgatgatttgacctatattctagggcagcttttatcgtaaggctgctttttttatgttccgccgttttttgatacactagagaaagaatgaagagatggaggcttttgtgatatggaaacgttagcccttttgaaaaaacaaatcgctgaagaaacagcgttatcccaaaaacatgtcgaaagtgtcatccgcctgctggaagacggcaataccgtcccgtttattgcgcggtaccgaaaagagcagaccggctcaatggacgaggtgcagattcaggcaatttccgagcggtggcaatacatacaaaacctgacgcagcggaaagaagaagtcatcagattgatctctgagcaggacaagctgacggaagggctgaagcaaaaaatcgaacaagcggtcaagcttcaggaagtcgaggatttataccgtcccttcaaacaaaaacggaaaacaaaagccaccgtcgccaaaaacaaaggtcttgaaccgcttgcggactatattctttctctcccgaaagaaaaccgccttcacgacatcgctgatcaatatatcagtgcagaaaaagaagtcgcttcaagagaggaagccattgaaggcgcgaagcacatcatagccgagcaaatctcggatgatcctcatttcagaaagtggattcgccaggaaacgtataaaaaaggaattctcacttccgcggcaggcaagtcagccgctgatgacgagaaaaacgtctatgaaatgtactacgagtacgaagagccgatccaaaaggtcgttcctcacagagtgcttgcgatgaaccgcggtgaaaaagaaggcattttaaagattgcgatcgaaccgcccgccgatcagataaaagcttatttagaaaagcaaattatcaaacaccgtgaaacgcctgtgatagaaacgctgaaagaagccattgaggacagttacaaacgtctgatccagccggctattgagcgcgatatccgcaaagagctgtcagaaaaagcagacgcgcaggcgattcatattttcgctgaaaacctgcgtaagctcctgctgcagccgccgatgaaggggaaagttgtgctcggcgtcgatccggccttccgtacggggtgcaaactggcagttgttgatgagacgggaaaagtgctgaaaatcgatgtcatttacccgcacgctcccgtaaaaaagacagcggaagcccgggaaaaaatcaaacaattgctggatcggtacgaagtcgaggttgtggcgatcggaaacggcacggcatcacgggagacagagcaattcgtcgttgatgtgctgaaagaaacagagcgtgacatttattatgtcatcgtcaatgaggccggagcaagcgtgtattccgcgtcagaaatcgcccgtgaggaatttccggattttcaggtcgaagagcgcagcgccgtctccatcgcgcggaggttgcaggacccgctggccgagcttgtaaaaattgatcctaaatccgtcggcgtcgggcaataccagcacgatgtcagccaaaagcaattaaacgaatctctccgttttgtcgtagagaccgtcgtcaaccaagtcggggtgaatgtcaatacagcttcagccgcgctgctccaatatgtagccgggttatccaaaaccgttgccggcaatatcgttaaaaaaagggaagagctcggaaaatttacaaatcgcaaagaactgaaagaaattccgcgtctcggcgcaaaaacatatgaacagtgcatcggcttcttgagagtgcccgggggaccggagccgctcgaccgcaccgggatacacccggaaagctataaagagacaaaggcgctgctcaaaaaactgcagctcactgcggatcagatcggaagcgcggacgtaaaagagaaaataagcgcattgccgctgtctgaaacggctgaagagctcggtataggggaaattacgcttgcggatatttgcgggcagctgacaaggccggagcgcgatcctcgtgacgaagtgccgaagcctttgctgaaaaaagacgttctgcagcttgaggatttaaaggaaggaatggaattgcagggcaccgtccgcaacgttgtagacttcggcgctttcgtcgatatcggcgtcaagcaggacgggcttgtgcacatttcaaaactgagcaatcaattcgtcaaacatcctctcgacgtcgtatcggtcggagacatcgtcaccgtatgggtcgaaggggtggacgtgcaaaaaggcagagtgtcgctgtctatggtaaaataaaagcactgcttacgagcagtgtttttttctgtagaaataccagcactgattcagcagtttgatttggtaattgtccttttctaaaaacgctttttgcatttgtttcatcagccaattcggcatggctcattcctcctcagcttttagttagaggtcggttttaactcattgtatgcgaacggtgaattgtcccgttcaatgtttttaaagcggggtgcacttatggataacgaacaacttcaaaagctgacggaagacatctctgaacaagatttcggaaagccgttccgtcacagagccttcttcaatgaccggctgaaaacgacaggcggccggtacatgctgtcttcccataacatcgaattaaaccgaaaatatctgcttgaacacggacggagcgagctggtaggcatcatcaaacacgagctgtgccattaccatcttcaccttgaaggaaaagggtacaagcacagagacaaagacttcagagaactgcttcagaaagtcggagcgccgagattctgcaagccgctccaaaccaaaaagacacaaaagaaaacatatatgtatagatgcgcggcttgcggccaacagtatataaagaagcgggcaatgaatccggaaagatatgcctgcggaaagtgcagaggaaaaatcaaaagaattttttaaaaaggcttgactcattttaatgttctatgttaaattataaaagtcgttgagagacaacgacactttctcaaaaaaataaatgttgcttcttgacacaatatgtcgcatcatttataatgaagaaagtctgattattccacagtagctcagtggtagagctatcggctgttaaccgatcggtcgcaggttcgaatcctgcctgtggagccatatggagaagtactcaagtggctgaagaggcgcccctgctaagggtgtaggtcgcgtaagcggcgcgagggttcaaatccctccttctccgccagataagttctcaaccagacggcccgttggtcaagcggttaagacaccgccctttcacggcggtaacacgggttcgaatcccgtacgggtcaccatttaccttcgttgggctatagccaagcggtaaggcaacggactttgactccgtcatgcgttggttcgaatccagctagcccagccattttatttaaaatttttgaatcacttttagagcgagccattagctcagttggtagagcatctgacttttaatcagagggtcgaaggttcgagtccttcatggctcaccacttgtcacgcgggtgtggcggaattggcagacgcgctagacttaggatctagtgtcttacgacgtgggggttcgagtcccttcacccgcactttcttttcaaagtgctgatcatcatcactagcttatatgcttagtggaaagacagcttcatagcacgcggtcgtggcggaatggcagacgcgctaggttgagggcctagtgggtgaataacccgtggaggttcaagtcctctcggccgcatcaatgataccaaggattatagagatccttggtatttttttgtgcttatttttaaatgatctactgcccacaaactgcccacttacctaaagtaagtcatctgcagtcgacatcgcacaaatattttcatcattataggtagttactaatgcctcaagctccaatttgcaaaagcagagaaagtattgctaagcatggaggaccttgttatatgatcagctattagaattagacacgagataatagggtaggggcataagaatactgaaaaggcttaatcttttttaaaaggttaagtcttctttgggctataaatgtaatcggtgcccaattagttgccctgaattcatgaaaaaggataaaataggtgtaaataagttgtgattttaaaattagaatcaaatccttatcacaaaagcaataataactaatcggcgaagaaaggataacagtcaaatgaaaacattagttatcgttatacaccctaatttggaaacgtctgttgtcaacaaaacctggatgaatcgtttaaagcaagagaatgacattacggttcatgacctgtacggtgaataccctaattttatcattgatgtagaaaaagagcagcagctcctgttagatcatgagcgtatcgtttttcagttcccaatgtattggtacagcagtcccgcgttactcaaacaatgggaagatgatgtgttaacacatggctgggcttatggaactggaggtactaaattgcatggaaaagaactgctcttagcgatctccttaggcgcacaggaatctgattatcaagcaggcggagaatataatatcacgatcagcgagcttatcagaccgtttcaagtcactgctaactatataggaatgcgttttcttcctgcctttacacaatatgggacacttcacctttcaaaagaagatgttaagaacagtgcggagaaattggttaactatcttaaagctgagcattgatccggtattcgcgagggaagctgaaataaatgatgtgttgtgaaaataaggatttgtgatagatgttaattaaactttatttcaaagttacatcgactgaatgcaggagggcatagagcgaggacttaattataaaaaaagagaacaagctattcacctggtctctcactatttcaactttttactgttaattaacgccaagctgacggggaatatcatgcacatccacatgagatctatgttcaataattttaccgtcaacaatacgtaacaacatcataagagagaatttaacgctttttcctaaattcaattgtcggtgattggcctgtttaaatgcatccattatttcatacccggtgctacttatttctgttgtagtctgtgtactgattaataggtaaagaaagtcgaaaaggtatacgaaattcttcatacaaattaaagttttgaatgaaagagcaggattactcctgctctttttctttctaattgggctggattaaacgcagacggttattccttgggaaaaacaaaaaaatttcttctatccattgactagctgggctttagccgggtttctatcaccctgttgagcttgtcagattttaaaaagatatggtacgtttatagtgttttgtttcacctgattgtggggtaataaagataggatcagtaaataattcttaggaacgacctcaatcttataataaacatattggaagacgtaatggaagaactaaaataaaggtttaggatactttgaagaaataaaagtttttgttcgattgtgataatattcacaatagagctttattaaggggaatcatttctccaaatagtctgcagaaaataccaaccacagcccaaggatatatcactaaccgctttgcctggtattatctgttggatgtttctctttttgttgctttttgtattatttttagtccaatcggcaaaaataagttaaggaaaccagcgaaaaaactgaatttcatccttctttcctggtttacaatgttatttggcgctgatatggatattagtctagtcttttaaggtacagttgaaccaatcatccactatgccgttagctctccatcaggtgaaacagaaacccccagacttttagagaagcattacgctatacattctgggactgcatgcttggaccgtttatgcgcttgtataatgtggatttgataattaaggagtcgatattattaaatgaagtttaacaagaaaaaaattaacgttgtagacattcaaaaagcgaagaaaagcgtgtttgctacagggataggaaacgcgatggaatggtttgattttgctttatattcttatttggcagttattattagtaaaaactttttcagtccagttcaaaacgatgaattaaagttaatatttacttttgctacatttgcaattgccttcttacttagaccggtaggcggaattatttttggtaaaatgggtgataaatttggtcggaaaatagtattaacaattactattttaatgatggctttatctactttaataattggtgtgcttcctacctatgaacagattggtgtatgggcccctatattattactcttagctcgtattctgcaaggtttttctgtgggtggagagtacgctggtgcaatggtatatatcgcagaatcttctccagataataagcgtataaggttaggcagcggtttagaaatcggcacattatctggttatatagtagcttctgttttagttacagtacttttctggactttatctgatgttcaaatgaatagttggggatggagaattcctttcttcttaagtattccaataggattatttggtttatatttgagaagtcatttagatgaatcaccaatttttgaaaatgacatctctgaaagccaagaacaacaaccaggtttattagaagtcattaaaacatataaaaaagatatctttttatgtatcgtatttgtggcatttttcaatataaccaattacctattgttaggttatatgccttcttatttagatgagaaccttggtataagtgataatataagtacaccggttacagcaattgtattgattattatggtaccgttcgctttaacttttggtaaattgggagataaattaggaaataaaaaagttataacaattggattagtattaggaattgtattttcgattatctcttttcaatttcttaatatggggaatataacattcttatttataggacttttaatgttagggattgtattatctgtatacgaaggtactatgccaggatctttacctacgttgttccatactgacattagatatcgtacattatcctggacattcaacttatcagtttctatttttggtggaacaacacctttagttgcttcttggttaacccatgtgacaagaaacaatttggcgccgggtttctatttattggcagttagtttaattggcttaatagttgtgttaaccttatttaaagatacttcaggtaaatctttaaaaggttcttacccaacagttgcttctaaagctgagtttcaagaagctgttgaaaatccaaaagattcactgtggtggaaaatggaacaaacagaaaaggaatgaaaaaaacatccatttaattgaccggctactcgacatacagactcagaataagctgggattatccgagcagcaatgactgcagctcttttatattctggagggcttactgctttgcaaaagcagcgttgctattctcgatcgtcattattttattggttgtgtcctaataataaaacgttgacgcaaaaacgaagagaaattaaaaggtccgagcaatacagcaaaataagtagcaagaagctttgttatgccagttcttctcccgaaggagagctggctttttattttcttatggggtccaaagcagaaaacgagaacttgtacgctaatcacagtatttggttcttcttgttttatgggagaaggaaaaaatatctgttaaaggtttaggcgaagaattatatctagactccggaacattaactccagttttaaaacgacttgaggagcgaggtcttattataagagagcgttcaaaagaggatgaacgagtgtaattattacgttaacaactgaagggaatgagtttaaagaaaaagtcacaatgatacctaatgcagtatttgataaaaccggttgtaatgaagaagaaattaaaagttataacaaggaaattcgtaatttacttaacatgctgacaactgagcaatagttttatgaatatagatggtgggcccagcggtgaataacccgtggaggttcaagtcctttcggccgcatcaatgataccaagggttttgacacccttggtattttttgtttaaaaaaattcatctgttactgtccacttacttatagtaggtcgtatgatttgtcagtcaccttcatccttctgctgactgcgtgcacggtagtaaatatgataatgattaatgaagtgatgaagcaggagaagaaagtcagaaaagaaatgcgagcagattcagatgagtacaaaagagataacgccataattcgtgtatatgatgacgggaaatatattcaacttgcgttttatcagccagaagaaagttctcgtaggctgactgcttattcttattatgagaagcttggagattcttatgaggaaatggcacatatgccgggtgatggtgatggcgaccgccttggtctttataagaaaacacctgattataaagaggttaaaggcaaggaaacaaaaacaatgtgcttgttcatacctgataggggaacaattgttttaccgttaagttgttgtgtgagagccagtatgttaaaatgctacgtagatttaataataaagtttagattctaggagatttatttatgaagttggatgaattcaccgtcgggcaggtttttcaaactaaatcttttgaattaacaaaagagaatataaagaattttgcagaagtgtatgacccacaatacatgcatttaaatgaagaaaaagcaaaaatgggcaggtttaatggaattattgcttctggaatacaaacgttatctattacttttaagctttggattgaagaagggtgtcatgaagacgatattattgctgggacaggaatgaataatataaaattcctagcacctgtttaccctaatgataaactgaacactattgttaaggttattgataaaaaaccaaataaaagcctgacggggatacttactgtattgttatctacctataatcagaaagaggaaaaagtgtttgaaggtgagttatcagtattaattaaacgctaaatgacctttgcggcatatcatcgtcacctttcaatttttataggtgtctggatgaaataagcaatcatctaaattaattgagtggactttgagtctgctctttttttatttgttcaacctatgtcgagaaacaaaggactcacaataacgaaaaaatcatctcgtaaatacgaatttaaaaattgctgccttgagttttttttgcatattcctctgtatcattgcgccgggtgaataattataatgagcgttctatccttcgatgttatatttcctttttactttttggttttgtcagttcaaagctgtactttaccatgtcatggatttgatgctctgggagtccctcatctaaggtaagcgtattccaatgctccttgttcatatggtatccgggcttgatttcttcaaaaagaccacgcagaaaatcagccctttcaggttcgcatttaaggttgacacataagtgttcgtcgcgagtgaagataagtgcaaatattttcttattccctttgtgacgaattgcagtccaaccatctccaaaaggatggtcttcataagagtttggaaaggttaggcagtaatcttttatttcatcataattcattatcaattcactccatacctcattatttttatatacagaacatattcgttcaaactaagatttgcggtttcttttataccaatccgagatttcctcaagtctttgtttgaacttagcttctgaaccttgagttgttggatagtaatactcacgccctattaaagaatctggcatcgtgtgcattgtcgttaattttttctctgtatcatgagcatatttatatcccttaccgtaatctaaatctttcatcaaaaggagcagactttatgtctgctctttttttgttcatgaaaaagccatttttttaatcaaaaaatcaatatcaattcggggctggattcaatatgataaaagattttctgtgaaatcatttaacaattattgatcaatttttctttttcaataatatcctttaccacatcctcaattgttatatgcccaagagctttttccaaggcagattgggcgatttcaaatattggaccaattgtactttgaatgttccggcctacaggacattgaggattgggattttcatgtatactaaacaattctttatcttgaacaacattaactgctctataaacatcaagtaaggtgatttcagttagatccttcgctaattcagcccctgcaatacctggccgaacatttactaaacctgcttttttcagcatccccataatttttcttatgaaggcgggatttgtatttacacttccagctaaaaattcagaagtgctaattccgtcttcatttatttcaataagagccaatatatgaattcctacagcaaaacggctgctaatagacatgatttcttcaccatcctcattactttacactctttatagtacacttgtaactgaatgtattacaagttcttttactctaatatgctcaattaacaagatgataaaagtattgacaaataaataaggtgtaactaaacttattacatgtaattgatatggttacatttaaaattttgaatgattaggaggactttaaattgaaaattggaatcattggtgcaaccggaaaagctggaagtcttatcttgaaagaagcggtaagcaggggacatgaagtaactgcaattgtaagagatgctgcaaaacttaaagaggaaaagattgcaatcattgaaaaaaatataattgatcttacatcggatgatctaaaaaagttagatgtagcagttaatgccttcggtgctccattaggagaagaacaggcacatgtagatgctggccgggcattaattagggcattaaaaggaacgggtacaagagccgtaattgtaggtggagcagggagtctttatgtagacgaaaataaaactgtcagtgtaatggatacacctgatttcccggagatttttattccgacagctaaagggcaaggtcgtaacttgcaagaactaaaggaaacttctgatattaactggacatttatcagtccttcagcggtatttgacccagacgggaaaagaactggattttatcagtcaggaaaagatcatcttcttgtgaattcgaaaggtgaaagttatatcagctatgcagactatgcaattgcagtattggatgaaattgaaaatccaaaacatataaatgaacgctttacagttgttggagaagctgaataagtgattgagtagaaacaaagggtaccattagtgtcatcgctaatggtatcttccttctaagaatggacggagacattgaaaactttgcaatcagagcagctgattattttttgaaaaaggggatttatcacgtttagagcttttgtaaacccactcgttttcgtgagtgggcttttttaaaatacacctatcaacatgatatttattattaagtacggtaagggtccgtcaaaacttctaaattacagaagtttattttcatgatagtttaatcataatgtcactttcgaataatatcgattaaacttgattgaatagatcaagacataaataacgattagtgcggcaaatgtgtttagaacaatggttttataacagaaaacacagtttcactttattgagggcccagcgggtgaataacccgtgggttcaagtcctctcggccgcaccctaatgataccaagggttttgacacctttggtatttttttgttgtaagtgcatgtggcattaaaaaagtgctgacctctgcacaaaatctttgcgcgagtctgcacttttattatgcaagatacactgcccattatcatcgattatgggcgtttatttaatccgttcttagccgagctgatacctggcttttagacgtttttttaaagtgggtaaaaccaacaaattttttgccttcttcatcccataggcggaactttaacgacttaatacttgttgccagtgtgatggtcggaacgttttgcaatggttcagtgttgttatgcacgatttcaagcttatagtttgggactcttgggcttaaatgatgaacatgatggaaaccgatattgcctgttaaccattgcatgacttttggaagcttataaaaagagcttccttcaacggctgcttttacatattcccaatgctcatcttcttcgaaatatgaatcctcaaacgtatgctgaatataaaacaaccaaattccgagggatcccgatatcataaaaattggtgtctggaccagcagaaagttttgccagccgatagcccaacataaaagtgctgccaaagcgacgatccccaggttcgttacatatgtattcatccgttctgtgcgttttgcccctttacgattaaaacgattggtaatcccgaagacgtaaatcggtccgataataaacataacaaacggatttctgtacaaacggtacattatttttgtcttagttgaggcttccttatattcctcaacagtcagtacccaaatatcgcccgtaccgcgtttgtccaggttgctgcttgtcgcatgatggacagaatgatcgtgtgcccaatgatcaaacggatgcagagtcagaattcctgttattgttccaaggattcgattcgcctttctgttcttaaaaaaggaatagtggcagcaatcatgaaagatgatgaaggttcttactaaaaaacctgctgcaacgacagaaatggctaatgtaaggaaataagaaatggacaagctcttatatgccaaataccatagcaggaaaaatggtaccaatgtgttaatgatttgacatatacttttttgtaaatcggacttttcataaggtgtaaccagttttctcaaagtccttaggttttgttcattcattttttaaagatttccccttccctgatgttcttctaagtatcgaaaacgtttgtctttgaagtcacagcgtcatacaccatagatgataagtatctttcccatccgcctgtgaaattattggaaatgagatacttttttccagactgattaaatctttattagcagaaccagccggaatacaaaaggtgtatgaagattatacccggctctttatcgggccaaactctctccatgctccccaatgtgaatcggtttatttagaccgtaaactttgattgtttgaggaacaaacatgacaagttaataccgttaaaatagaggtatacctgagtgatcgtttggaaacatctgcagaaacaaagctataccagtgaacagccaagaatatcttgtacttgaacaagaaacagctgagctttttaaagaaatctttaacaatcaatatgaagtactgggtttgaagacactcgtgatccattttcacggtgttttcacaccatagttattaataagcatcttattttgcactggtatcgacaggtttaacaaataaaacatgaatgaacatattattaatttgcagttatttccgtttcgtgctatgataaaggagaattatttttgttcgtgtaaaggatagtatgaatatcgacttttcgtcttgatgatactttgggcaaggatagtaatacaatgtgtaacacactaggaggcaacaaaaatggaacaaggtacagttaaatggtttaatgcagaaaaaggttttggatttatcgaacgtgaaaatggagacgatgtattcgtacacttttctgcaatccaaagtgacggattcaaatctttagacgaaggtcaaaaagtaacgtttgacgttgagcaaggtgctcgcggagctcaagctgctaacgttcaaaaaactgcttaatcttcaatcgtttatacaaacaggctctttatatagggcctgtttttttatgttctctgtatcatactgaataaaaaaaccctactcaacgttcgagtagggacagttgctacaaggtaagaaaaaggtttaaaacctcaaaggattgtttacagtataacataccggattgacgatatgtggaatatatataaatgatttgtttttatgttctcaatataactgtatgttattctttgttacatttcgcatatctcttttatgaaaagaatataaacaactgctattcactgtgggagcagatgtaagaaattcttaaagataaagaggagagtggttgttttttcttctggaaataatcacttagacctaaaacaatgaaagccctgcctctcttccatccttacggctccatgtccgtgccagtgtgaatcaggattacaaaaatcaagtgactatttcatcgagaattcaaatgttcgttgaagaaaaaaataaaacagattagattgtaggaataataaaagaggttaatgttctaaaagtaagttgaagaagttaagcgtctttgaaatattttaatcgtaatattccgaaaactcgtgggtgctttttggaatgcaaaacattatttaaaattaaccttagcagaaactttttatttgtttttcagtgattcctttaatgacttccagttcactaatcaaaaattcataggcattatccaacatttttttttcacttgaattaagtgctttttctttcttcattcgcattaaatcacgtacaacttcaacgccttcttgtatttcacccgtttttattttgttcgtgtttactatatacctttgcttccacggcagtaacttatctgattctccatgctgaaaaatgtgtataatgtgttttaatgcacgtatatcagtaactggccgtatatttgaactcaatattttacgcgttggaatcataactgtcatattactgattgacattcttatgacataatactgttgtttttcctctaagaattgtttttcttctatggcttcaattgtacctgctccgtgcattggataaacaatgttatcgccaatttgaaacatataatccacctccatatatgggaacttaacttaaggttatcatatatggagtgagatatcaaatttttaatgataacatggtcatttattggtgtcaataactttttttaaaaacaacatcaaaacaagagggaacctgcgggattcccaaaaaagaaaagatcaattcaattggtccgtgtatatcttggaatctcgactaattaacagagatcagtttttcgttgaaaatgagttattaaatctcctttaggagttcatgccttgacatcaatgacactttactaatctatatgggcacaatttaatcaccgatttttaaccataattcatgaaaacatatagaaatgatgaaagtggaggatagagagtgtaatgaaaacaagctttcataaccttagtgtatctgccattcttctgcgtgcggcggaattagatatgataattcgattaatgaaatgataaaataggagaagacagccaaaaagaaatgagagcagattcagatgcgtaacacaagaataacttatcgtggtcgtattcgtacacatttttacagaggaggacaattatgattggaatactggcaggaatggggccaaaatctactgggccatttgtagataaggtagtagacgagtgccaaaaaatatatggagcaatacatgacatggattttcctcatatgatgatttattcctgtccgactcctttctatatgaataaacctctcaatcatacggacatggaaaaggcaattattgagggggctgtaaagcttgaaaaaacgggtgttgattttattgcaatcccatgtaataccgcacatatctattttaaccaaataaaaaaatcgatttcagtccctttactaaacatgattgatgaaaccataaaaaaaatacctaaaggctccaaaaaagcagctcttttagccactgttcctacggttcaatctggaatatttcaagaagcgttaaacagagaaggttatgattttttacatcaagatagttggcaaatctatgtcgatcacataatagaaaagattaaacaaggtcaaatcaatgaggctcgtacattatatgatgaattacaccgtgacttagcagaaaaggttgatacggttatcattgcatgtacggatttaaatatggtcacggatcaaaaaagcagcgaacttacctttgttgattcatcagcttgtctcgctcaagccattgtaaataagtatgtattattaacaaaataagccgtctgatttatcagcaaattcagggcgctttttttcctttaaagcgcccggcttcggcaaatacatgatcctcgagttacttctttgaatgtaacttccccgcgttattgttcttttaacattgaatactttcgatacgctttatagaaactgcagccaaatagaacagccataagggcgggaagcgacctcaaaagggcaaatggagtttcaaataaaaatgctttccaaaacattgcgctttccatactccacagaccttcagttaaatacaaacctgaatccttgtaaatcaaataagaataaaacaagcacagtaacccaaaacaagatgaaaaactcattagtcttttataataattactctttgattggcgatccgagaagatttcattttgatcatcatcttctttttgccaatatcgagttccgctaagccatgggctgtttatataactccagccgaagtcttcatagatctctttgtagtctttgaactttttctttgataaataatcttgataatccagtcgcattacatattttttgtcggttttttcgaaagtgtatattcctaatccgctgatatttgtacagtgatagcctttttgtaggtgctcgttcagccattgctcctctttttcaatatcaaaaaacatcttacatttcttcattcgattcacttccttcgtgcagggataaaatatgaagtaatctgttttgttccattttcaaaatggcgcttccttccgcagttatcatataaacttttctccggcccgcttctccgacaggttcaatccagccatgcttattcaagttttcaatcgcgccgtataatgtgccggctgctaaaataacagttccgttactcatcttttcgatcttctgcatggcagcatagccatgaagcggctcccgcagagctaataaaatataatgcatggtttcagacagcggtaataatttatgtttcatatcctcatcctctattcagtctgactatatagttaaacttaatacagttcaactgaatagtcaatggtcttttcaaaatttgtcaaaggaacttgaaaatcaaatctaaaaagccgcttttcttacgtaatgggaagcggcttctgagtagtcctattcaattaaatggcccgattgttggttgtaatgcttaacttcagtgtttgaaatgccgggcggtaataagatttcactttatcgaatgcccagcgtataaataccccgtaaaggtccaaatcctctcagccgcattaaaaataccaagggttttgagtcccttggtattttttgttcattgttttaagatgtgaatttccttagtggctgtcgttccagtttttctctataaatgtattcacaggctgtaagttggttttgttcgcaatttcaatgacagcgggaaccacggaagggtctgttttggagaagttaggaatccgcggatctaaccggaaaaagcgatctcccagcagattcgcactgaccatggattcatagtagccatttccgccggagatcatctgaagaaatggcagtaatggttcattaggcgacctgtccaaaaggactccccaatttggaggaaggttcttcagattttcgggacgtatgttatccgcacttaccattccccaccccctcgtatctcttcttaaccgagtcggggcttcgcctgtaccgatggatagcgccgcaatttgatccaatggcacgttggctttaccaaccgcaaacgcgatactggccgtactggggttcgttgccactacatatccgtccacgtagttttgataggcgcgctgcgttgcgggagcaccgctgctccgcagtatgacatcactcactttctcatttaaatagggagagccgggaaagttgtgaaataatacgggcgtccaacgatccagtgccggggagtataatttgaatgaagggacaacaattcgttttcttagatctttaaggcgaaggcctggcgggaaaaagtttcgtaccgctttaataaaaccggaatatggcaattgttgattgaaaacaggtcctcccggccgggaagtgctgaatgcgggcaggatttcatcctcaaaatactgaagtgtttccttcggagatcttccgcttgctaatgcaagggcagtaaatgaaccgattgaatttcccgcaaatacatgggttcggcttattaatgctggattttcttcagctagtctgttcaatagttgtaaacttaaagcacctaaggtaccgcccccgtcaaaggtcatgatccgatactttgccaaagctgatttctcctttctaatgaaaactatcatttagtatatgttcaaccagagtctattgtatggatgaatgaatatctcataccataaaattgctcaatttatcaatctaacggggtgggaaagaaaatatttttaagtttaagaggcggatcatgaaggtattccatgggaagaaggagaataggttataaaaataaaagggggaaaaatatttgaatacgattgaccttatcgttttacattttgaagaggtgagacggcgaagcatcaagttatggacagctatacctgaggaaaaaatggactggcgcccggattccgaagccatgtcgtgtaaagaaatgataagacacatattagaagcagaatttctttatcatcaaattttaatgaaaaatatgagtgagttttcagaggaaactattaatccttatgaaacaaaaacgtttaccacagtaaacgaagaattagaatttgcaaaaccgtatcgggccgagtttttgacattcatcaaatcgttaaacgaaacagatttaacaaatataaagattgacaggtctgatgttggatatattcgcgaactaggagacatgttattaagaatcgcttaccatgagtccgtacataccggtcagcttttagactatctcagaactgctgaagtggacaggcctttaatttgggactagttaaatgatagagttttacaaggaaagcggaaagaatggaatataaaccgattaattttcaagagaaattagctgcgttccaagatcaatggtctccaaaagtaatcgctgaaatgaatgattatcaatttaaacttgttaaagtacaaggggattttgtttggcataagcatgacgaaacagatgaagtcttcattgtcattaagggtaatttaatcattgaatttcgtgatggagaagtaaaattaaatgaaggtgaaatgtttgtcattccgaaaaatgttgaacataaaccttatgcagaatcagagtgtaacattttgcttgtagaacctaaaggtgttgtgaataccgggcaggaaataactgatcaaacagctgaaaatgatgtctgggtctagcctgtaacaaaaaaatgatcaaaaatccgaaagatcgaagacgattagagaaaatgatcaggaaaaccaattaagaatgatttaaggtaaattattgaaaaattttgttaatattataatacattgttttgaaatgtaatcattttataaggagttttctaattgcgttggagtaaatggttcaatattttttgcatagcagcattggggtcaatatatggctataaattgtttactaaccaagaagtcagtacgactcgtgtaatcatagctgctgcaattatcttgtggaacgttgtcggactttttagcaaagaaccagtaaaacaaacacagcaagcaaactaaaagccaaaaaacactttccaatcgttcaataaaaagttgtacagaaggatgctgcagcgtgcagcatcctttttcgtagtctccctttttacgctgcttatcataaacatttaagtttcatcaagcatccagaatctgttgtatcgataaatgaaaattgccctaaaatgtgccggttcatcataataccagtccaagctgcagttatttctttacatagtatgtaaagattaaaagatgagagaaggagtggcgtaatgtattataacgaaggtgaagatcaacagtacgttcagaagaaaaagccatacaacgaagcctgtgaccttggccatgattttgatatggcggaagacgaagcaagagcagaagcagcaagagaagcagaagcgagagccagagcggaagaggcgatagcaagagcggaagaagcaagagccagagcagcagaagcaaaggtagaagcggcaaaattagcagcaaaagcgaaatgtaaaaaacgtcataagaaagagaaaaaacaggattgcaaacgtaagcacaagaagaaaaaataagagcttttcatcatataaaagataagattcaatgtgtattgattttatccgtacagggatgcaaaaacgcgataaagaaaaagattcttgtcgggggatcaagcagaaagattgctcagccggtgtctcagcagaaccacgcatggcagggcaaacataattttctatggacttccatagtttggtcgggatatcacgccaataaatgtaagtgcctatcatgataaaaaaggcaggagagacaagagtttcggcagcttgccgctcttgtcttttttttgtttttatatcatcttcgcgtatatgtatctatttttaagtttgcagaacatctgtctaagaatttgtcccattcctacatatactggtatcggaatcaaatgcttattgggagtgaaatagatgggatcagcacagttaacaggacgcgtcatcttcaaaggggaccccggctatacacaggcggttaagaattggaacccttatgttgatgtctgtccgcttgtctttgtttttgcacaaaattcatacgatgtaagtaatgctattaaatgggctcgtgagaagaatgtgcctatgcgtgtcagaagcggccgccatgctctggataaaaatctttccacggtaagtgatgggattgttattgatgtgagtgacatgaataaagttttcttagatgaaaaaaacgcggtagcaaccgttcaaaccggcattcacgtcggcccgcttgtaaaaggtttagctcgggaaggttttatggccccgttcggagacagtccaaccgtcggaatcggaggaatcacgatgggaggcggatttggagtgctttcacgatcgatcggcctgataagcgataaccttctcgcactgaaaatggtagatgccaaaggcaggattattcaagcaaatcaatcccgcaatgaagatttactgtgggcttccagaggcggcgggggaggcaatttcggatataacacccaatatacgttcaaagttcaccgtgcccctaaaaccgcaaccgtctttaatattatttggccgtgggaacagttagaaacggtatttaaagcgtggcaaaaatgggcgccgtttacagacgaacgattaggatgctaccttgagatttacagcaaagtaaatggcttgtgccatgcggaagggttgttcctcggttcaaaaccagagctgattcaattattaaaacctttattaaatgccggaacgccggcacaaacagtaatcaaaacattatactacccggattgtatagatttcttagatcctgacgaaccgattcccggcagatctgatcagagtgttaaattctcctcggcgtgggcgctcaatctttggccggaagaacctattgcagtaatgagacaatttttagaaaaagcgactgggacagaaaccaatttcttttttatcaattggggcggcgcgataagcagagtaccaagcagtgaaacagccttctattggcgccgtccgttgttttatacggaatggacggctagttggaaaaataaatcacaagaagcttcgaatcttgcatcagttgaaagagtgcgtcagctgatgaaaccatatgtaacaggttcatatgtgaatgttccggatcaaaatatcgagaacttcggaaaagcatattatggctcaaactttgcaaggcttcaaagaataaaggcgaaatacgatcccgaaaatgtattccgttttccgcaaagcatcccgccatcgtataaatagtttgatcgttttgggaaacaaataaaaaacacaccagaactttcaggtgtgtttttattgttgctaaatttggttattcaattgcatcccagtgcggattccaaacgatttcccataagtgtccatcggggtcttggaagtgaccggagtatccgccccaaaaagtatcatgagcgggatcagttatcgttgctcctgcctgttttgcctgttccatgactttatcggcttcagctttactgctgacattatgtcctcatgtaaattctgcagggcttggcgcatttaacgtaacgtttgtttcatgtgcgatgtctttgcggttccaaatggcaagtttcagtcctgtttgtaagtcaaaaaaggcaactgcgccatgttcaaattctgtaccggctattccctctgtaggcagatccaagccatctcgatagaagtgaagcgatttttctaaattgtctgcgcctaaagtaattactgtaatccgcggcttcatagcaattattgatcaagagcaatataaagtattggacattttcattgaaaagattttgacatttcagtaaagaacctatatattcatatatgatcatataatcatataaggttattttttgtccatgttagaatgcttcataacagaaaagaaataataaatgcagtgtatgagataaggaggagatttttatgggtcacaatcacaatcacgctggcggatccaataagaaggttttattgatctcttttatcatgattacaggttatatgataatagaagcgataggcggttttttaaccaatagtttagcgcttttgtcagatgcaggtcatatgctgagtgactcgatctcattaatggttgctctgattgcttttaaattggccgaaaaaaaggcaagtcatcataagacattcggctacaaacgatttgagattctcgcagctgtgataaacggtgttgcattaatattgatttccctttacatcatttatgaagcaatcaaacgtttctctcatccgccggaggtagcaacaaccggcatgctgacgattagtatcatcgggttagctgtaaatatattggccgcttggattatgctgaacggcggagatacaaagaataacctgaacataagaggggcttacttacatgtgataagtgacatgctcggatctgtaggtgccatactggctgcgatcctaatcatctttttcgggtggagctgggcagatccagtggccagtgtcattgtagctattcttgttctgagaagcggttatcatgtgacgaaagactccattcacgtattaatggaaggaactccggaaaatatcgatgtcactgacatcattcatacaattgaagagacagaaggaattcaaagcattcatgatttgcacatatggtctatcacaagcggattgaatgctctttcctgccacgcagttgttaacgatcaactgaccatttctgaaagtgaaagtattttacgcaaaatggaacatgaacttgctgataaaggcattacacatgtaaccattcaaatggaaacagcagcgcataatcacgacaatacgattctttgtcaggcccaatctgagaatccgcgtgaccatcatcatcattaaaggaggaaatagggactcactttgtctgctgacaattaagataaaaccggaggggggattcatatgtacgacacgatagtaatcggagccggtcaggcaggaatctcagtaggatattatctaaagaagtcgaaacaaaagtttatcattttggataaaagtcatgaagtgggagaaagctggaacaaccggtatgactcattggttttatttacttctcgaatgtacagctctttgcctggaatgcagcttgaaggagacaagcatggactcccttcaaaaaatgaaattgctgcttatctgaaaaaatacgttgaaagatttgaaatcccgatccaattacggacagaagtaataagtgtccaaaaattaaacaactatcttcttaataaaaacaaaccgggaagaatatcaaacgaagaatcttgtgatggccgcaggtccttttcatacccctaacattccatcaatatcaagggatgtagccgatcatattcatcaattacattcttcacaatataaacattcaaaacaactggcgcctgggaatgtactggtagtcggcggcgggaatagcggggctcagatagctgttgaattatccaaagaaagagttacatatttggcttgcagtaataaaccggtttatttccctttatggattggaaaaagaagcatcttttggtggtttgataaattaggagttttacatgcaagtcatacatccatattaggcaagttcattcagaagaaaggcgaccccatatttgggtatgaattaaaacatgcaataagacagaagaagatcatcttaaaacaaagagtcatagccggaaagcaaaatgaaatcatttttaaagattcatcttcattagaagtaaacaatatcatttgggcaactggttttaagaatccgctttgttggatgaaaatagaaggtgttttggataaggaaggccgaattatacatcaccggggtgtttcagctgcggaaggattgtattttattggtttgccttggcagcataggcgaggttcggcgctgcttcaaggtgtaggaaatgatgctgaatacattgtaaaacaaatgaacggtgggtagactgaggagagcagtaacttacgggtttcctgctcttttttgtgttgaataagtccatcagtgcaactattttagtccgcgcatattcagtttgaactaaatggattcacatggagcgcgtgcttcactcctcgttcagactctctaatttaattctttcaagtaaaagtcgaaatagctcaaataacaagaagttaaaaaactgcaaaccccgccgtatacgtatccgcccactatagagttcattaattacttgggaccatagaagaattgtcaatgtcacttccgatagttgtaaccagccaaaaaaagaaaatggggagggtgtgcttaatttgcacaatcttttatgtagaagtggcccaaggagccatcctgcattttgcattcgaatgaacctgtcgtaaaaaattgagagcagacttaaatatctgctcaactcgctgttatttctcaatgttgaatcggtctttgatcttttcaggcagtttctcggccttaatagcttcaggttctccggtataaccctcatagctcctcggaacgcgtacaatgtcaccttcttgataaggcttttcaacaaagaaagaaaccatctttttcttacctttctcgttatacccttctaaattgtaaacgtagttgctattatttttgtttttttccgcttttccgtgaatttgtacgtaataatcgctttccagcacggcgccttgatcagcgcagcctcctaatatgaaaaccgataggcagcctaatataataatgaaaatgctcatatttttcattcttcatcactccttttatatttcttattctagtgaacactgcatatcgaataaatgcggataccttacactcaccttacttttttgtaagaattcctgatataaaagataatgattcagttgcagaataacaaataatgggtaaatgcaatctcgtttggaaggagactgatatgatcattaaaatgactccatttaatatgaaagaattcaataaaccaaacaaccatttgctgtttcagggagaattgcacctgcatttgaaaacaatgtgtggaatataccgaggaacgatttgctgaaccttatgttaagaaaaatgaagatgatgatgtcagttacgttgaagaagaggggaaagcggtcttttttttattatgctgaaaacaactgcgccggccggattaagatacgttgcaaatgtaatagcgattttttgtctgaccattttaattgattggcagtcagtgaacatgaatttgtaataaatttatccttgctcctcctataatcggctttaacagccaagtttctgtttctcttcaaaccatttgcgaagctgattaatatgagcttgatgatatctattatggtctgccatatgccatattccccattgaatggttgcttgtttttcagcttcataatctactgtgtgattcagttgatcgtcagttaactgataacaaacagacttaaacatgctgaatactttttcataatcagtgagaatttgttttaatgaaacaccggaaatgaaagggatcttattgttctgatctaacattggtccatacttctcttcaagctgctttggtatcggttcaccctttattctgaatatccagttgagatcaacatatgctaagtgtcttattagctgagctgtactattgtatgtttgatttggtcctttataatcgacctcctgctgtgacatgtctgacacaatggatattaagcggctgtaattttcattaacggcagaatacagcattcccacaagatgatccatgtgcggttcaccttttaaatctaaaatcataaatcccacctcattagtacaatttttatatttagtttgccttattactcttatttgtcaagcaatccagagaatgaatcgctataggatgaagcgatgaagcaggctctctttccttttttgtgtgtcagcctttacatctgacatgttgagttatctgaaactgtacttttttaaatgtcagacagtgttatatgatactctgcagatattcaagaatagtacttggaggtcattctcatgcaaattttattgctatccctacgccttttcatgaagatgaacgtttatattcagcaggatttgatcttattgtcgaacatttgaaaaacagcggtatccattcgttactcatatgcggcacgactggtgaacagcatccactcagcatagatgagcgccttcagatcattgagtatgttaatcagcgaaaaatttgaagatgttgaactgatattcggggtttcagccgtaagaaccagtgatgccgtcaaactgatgaaacacatcgagaaaaccaatattgattctgtacggattgtttttcctcctgatataagaccgacacagcagcaagccgtttattacgttattcattcatcaattgacttcatattatttcatttgataacataaaatggttatcgtcttaaaaaaaaggatacccgtttttataaaaaggagtcataacgttgctgaaaaggctttttcttgtttttcttacgctgataatgtctatatttgctgtattcgcggctgctgaagagtctcccggcgatcgtgtcatttcttttgacgagcctatgattttattgatctcactcggaatcatcttatgtttgttcattcctccattcgtcatgtccttttttggcagtttggttgtgagaatcatatccggagtctatcaatgttttatcgtcctcacgtttgcggggctcattccgattggatttctgatccccaatggctttttgacaattcttgctgccgtactggggactttggtcagtttagccagtgttgtggtcaccttattcgttggcaggaaaaaagaggccggaaggttttaaaactagtgggtaagctgcaatattgaagggaaagtcattgtttgactatttatatggaatagcatagaattaaagtaaatatttataaaaagtcactaggggagctttaatagctgagaagagacaatacgtcctgaccctttgaacctgatttggttaataccagcgtagggaagtgaaaaattagagagattctttatcttatctatatttaagccactttccatagaggaaagtggctttatttattttgaaagggtgatatgaagtggcgactaaaaaagtttttctggcagggccttttaaaagtttagtagatgagaaaactggattgatgagtacgtatgagaggggaaagctggaatcattaatttccttttttgagaatgaaggatggctggttcataatgctcacaagcgggaagggtgggggaaagatttcatgacaccccttcaatgcactaaaattgattttgatgaaataagtacttgcgacctttttgcagcatttcccggatcacccgcttctcctggaacacatatagagattggatgggcttccgccttgaaaaaaaagatcgtgctatttctagaaaaggacaaggattatgctttcttaattcaagggttacatgcagtggcggatgttgagtacatcagctataaagatacagatgatttattagagaacattaaaaatatctttgcagcatataaggcggaatctcaatgagaaagagaacttttcatgaagcatatacggaaacgctgtatgacatctatcacaaccctgaattttttaattcaccgcgcggacaaaaaagcagagaacaattgaactaccatctgactctggaaaatccaatagaacgtgtcacttatttatcctcaagaaaaaccaatatcgtgtttaattttgctgaagtgctatggtatttatcggggagtaacgacttagattttatcagttattacaataaaaaaatgccttcatactcaatgaataaaaaaacattaacaggcactgcgtacgggcctaaaatattcgaattcggaaatgcaaaactaaatcaatggaatagaataaaaaatcttttgacacaagaagatattgattcaaaaagggcatttattcaaatattcgatgcttcggaactcttcgttttagaaaatatagatgtttcctgcacaatcggtttgcagttttttgtgagggaaggcgaattatacatgtcttctgtcatgcgtgcaaatgatgcttttcgcgggatgatcagtgatcttttctcatttaccttcatgcaggaattaatggccagagaactgcgtgtagaagtcggagaatattttcataatgcgggatcaatccatatttatgattcagatcatgaatgggcgaaaacggtgcttgaagaagctgaaaatcaccatgatattccggaatttgaattcccgaaaatgcctgagggaaataactggccgtccattgaaacagtcttaaagtacgaagaattacttaggaaagatcaaatttctatgacaaaaaacgatattgaaatgcttgatttacctgattactggaaacagattcttttccttttcagtatataccagcatattgcatataaacgtgatatggatcattctctatttcaaagtttacttcctatatatcaatttttcgtcaggaataagtggcttcattatttctcaactgagcaaaaggaggaaattcaatgaaaacttcatggaaagaagacagtgttgctggtaaattcgatgcttataacgacgttttagaacaaacgttaggttttgagtttgtttttcgtacttttgataaagcggagattaaaaaggtgctcgatttcggatgcggtccaggaaaggtagcttataggctggctgacagaataggctgcaatgtgatcgcagtcgatgaatcaaggaagatgttagatatagcaaaggcaaaaagacaacatcctcatgtggactatcatttaattgaacacgataatctttccttcttaccagatcactcagttgatgctgcaatggcctgttatgtttttattaatacggatagtgaccagcgtatcaaaggtatcatagatgaaatttttcgtgtgttaaaaccaggagcttcatttgtcatactcgatacgaatcctgattcaaccggaattgaattttcaaccttccgcaatggaatatcggggaaagaatattcttacggagaagaaagaaatgaatggctccatgttcccggacaagcagatttaattttaaatgattttcattggccgaaatcaatgtattataaactattaactcatgcaggttttgaaaatgtaactttatcagaaccaacgttaaacgatattgaccaagagcatgtaaaagccatagagaaagagtttcaatttaataattggaaatgtgaaaaggaatatccgccttttgtcatttttaaagcagtgaaacctgcctgaaggaggagtgtaagttgacggatatttataaagccctttcgattgctgggactgatccttccggaggggcgggaattcacgcagatttaaaaacatttcaggaacaaaaggtatatggaatggcagttattacatcagttgttgcacaaaacacacttggtgtgaaaagttttgaggagatgtctcttcagaatatatctcagcaaatagactgtgtcatggatgatataaaaccggatgctgtcaaaaccggtatgcttgcaagtataggaattattgaattgctggcagaaaagttaaaagaggcaaatattcaatcgtatgtgatggatccggttatgattgctaaaagcggacatcatctgctccataaggacgccattgatcatttgaagaaattattaataccccaaacaactgttattacaccgaacattccggaagcggaagtaatcatcggcaaatcaatcgagactgtacagcagatgcgtgatgcggcgaaagaaatagtggaggtatacggggcaaaaagtgctgtcgtaaaaggggggcacctgaacggagaagcccgtgatattttgtactttgacgaggacttcggggaatttgtttctccccgctttgacacaaagcatactcatggaacaggctgtacgttttcagctgtgataactgcagagctggcaaagcagcacagcataccggaatcagtggcaactggaaaggaattcatttcagcagccattaaacatcccttaggaatcgggaaaggacaaggccctacaaatcattttgcgtatcgctcaactattaaccaagagacaaccgcttaaggagtgttatgatgatctccgagaattatgatgtatttttatttgatttagacggagtgatatatataggagataaagctttaccaggagctgtggcctctttaaaacgactccgtgaagaaaagaaagccattcgctttttaacgaatgatccttgtgttacaagagaaacgattgtgaaacgccttcataaactggggatttcagcaagtattgatgaagtgtttactgcggggtgggcaacagctgattaccttgtcagtgaaggaataaagaaggcatatatattgggaaatgaccaacttaaaagtgaaattcaaaaggccggtattgatcttacggaagatcaggcggaggctgttgtcattggatgggatcaaaatattacatttcaggatgtgcataaggcagtaaacctcatccgctgcggggcttcatttatcgctgcaaacggggataaaacatttcctgccgctaacggaccagctcccgcgacaggcgctatagtcgcggctgttaaaacagcagctgctaaagagccgattataattggaaaaccggcgtcttcaatatttgaaaaagtactcgagtcttttgaagataaagagagatgcgttatgattggggatacgcctgaaacagatattgtcggagcaaaccaaataggcatcacttccgtattagtttctgaacaaaatactttatttcctgcaaaacatgattttagaaatccggatgttgtgatccgcgatctgaaagacttgttcgataatgaaataaaggcagaagtacggaaaaaaccggatttccaatggacagaacaagtgaaagccggagtcgctggaattataattaaagaatcaagttccgttttattaatgaagcgtgctgataatggtttatggggcattccttcaggacatgtggaacctggtgaaacagttgaacaagcaattataagagaaatagaagaggaaactggattagtggtgaaagtctctaaaatgataggcgtttattctgatccgagttcacaaacctttatataccctgacggcagagtcagccattttattaccaattgttttcaatgtgacgtcatcggcggcactttgaaaaagtccacagaggaagctatggaaatcagatattttgatatccatgaattacctgaacatctcttgccgatgcacccgagatggctggatgatgctttggaaatgaaagagaatgcttttattcgataaggaacagtatgtcaaaaatactttttgggggttatttacaaggattaacggttttcaacccatatttctcggccgcgttccaaaaacaccaagtgtcacagacccttggtgttttttaattccggcagaaccataatgcaagagcggcagaaaagaaggtataatgggcggagaagaggtgtcagccaatgaaaataaccagagagacattagaaaaacagcaaatttggatatatggtgtgactcttgtaatcggcggaatagcggggatcgccgggaaaaattcaggatttcgctggggatggacgatatcaccgcttatcgctgttctcatgtatgccatgtttgcccaaatcccattcttgaagctgaaggaagccatgtcaaacctcaagtttatggcggctttattgatcggtaatttcttagctgtacctgtcgttgtatgggtgttaaccgccatttttcctcaatctcctcctatattattaggggtttgtttggtattgcttacaccttgtattgattacgtcatcgtctttactcagctcggcaaaggaaatgagagattaatactggcttccacgccggttttgttcgccgttcagatggtattgcttccgttatacctgtggctgtttatcgggaaagaagtgataggggctgttcatgcgggaccgtttctggaagcattcttattgttaatagcagtgccgctgctggcggcggtgatgactcaattatgggctgataagaagccggcgggagaaaagatgttagagtggacggcgtggctgcctgttccttttatggctctgctcttactggcagtcgtcgccacacaaatcggaaaggtcatcagtgatgctggcatcattatacgtgtgattccgatctatctgttattcctgctcattatgccgtttgtctcccggcttatcgcatatgcgttccgtctggatacaggtgaaggaagagcattgatcttcagcacgggcacaagaaattctctcgcagtccttccgttagcgctggctttgccggatgcttgggcctcattagccgccgctgttatcgtcacacagacgatcgttgaattgataggcgaattggtttacataaaagcggtgcccggatggctgctgaaataaaaaataatttgaactgaaaaaaacataccaacaaatattggtatgttttttatgtcgattataaagttgaaatatcaatgacgaaacggtagcggacatcgctttggagaacccgttcgtacgcttcgtcaacttgattggccggtatcacttcaattttaggagcaatgccgtgctcggcggcgaaatcaagcatcttctgagtctgcggaataccgccgacgagtgaacccgcaatgctgcggcggcccgtgattaaggagaacacactgtatgagtccggcttagcgggcgctcccacatttaccaatgtaccgtcaatgcgaagcagggataagtaggcatctacgtcaaggttcgcggatactgtatttaaaataagatcaaatcgtccggccagctcagtaaatgtatccggatcgcttgttgcaaagtaatgatcggctccaaattcaagcgcttcgtcttttttgttcattgagcggctgaggacggtgacctctgcgcctaaagcgtgcgcgaattgaacggctaaatgtccgagcccgcccattccgacaatcgccacttttttgccgggcccggcattccagtgtttcagcggagaataggtggtaatgcccgcgcacaatagcgggctggcagcatccaaatccagctgatccggaatccggacaacgaatctgtcagtgacaactattttctggctgtagccgccgtacgtagggtttccgtcgtagtccaggttattataagtttgaacaacgccttttgtgcaatattgttcgtctccgttcaggcagtattcacattccccgcaggagtctacaaaacagccgacacccacacggtcgccgacggcaaatgtggtgacttcttcacccacggcttccacaactccggcaatttcgtgtccgggaaccatcggaaagattccgccgccccattcatcgaatgcactgtggatgtctgagtgacaaatcccgctgtacttaatatcaatcaggatatcgtgcggccgtaatgctcttctctcaatcgtcgttcgttcaaatttagcttttgcatgcggagcgcttaatacacgagtcggatgattattgcacatggttatcttcctttccaagataaagtgatgaatcctctgttcgattttactttaaatgttaaagcggactttaagtcaaggagtttggtttatttttttatgaaatgatattctataatggcacgcttatgaaaggtatgaaggacgggtggtaagaatatgaagattgcgcaggctgcaaagcaggttgagttatcagccgcaacgcttaggtattatgaaagtataggactgattcctccggtaaaacgcgatgaaagcggcatccgcgattatgacgaagatgatgtgaattggattcaatttataaaatgcatgagaagtgccgggctgtcgattgaggcgctgattgaatataccgctttatttattgaaggagccgatcatacgatcgaaccccgaaaaaacatcctgataaatgaaaggaaaagactgacggagaaacagagggaaattgatgaaaccataaaacgattaaacaggaagattgaggattacgaagatatccttgaaaatgaagcgaaacttaaaaacagattgaaagctgaatgtatttctgaatgaagagaaggtgtcccggacgcggggccgcatgaaatgtaccaagggaaacgagccttggtttttttattttctaaagagtggaaacaaaacagccttttctatcttatcaatcattacttatccttttttcagcttgacttttttactgcagacttttaaagtgtgaaatgttgcttagactgtgattagcgactttaatgctgaaaagaggtggtttacccagatgaacaataaaaagaacccttgggcgttattgcctttagtcttattcgtagggctttttgtcggctctggtctggtgaccggagatttttataaattgccgatcttgattgccgcgatcattgcgtcagcttttgcgctgttatttaaccggaagaaatcgctcaatcaaaaaatagaatggttcgcttccggtgcgggacatcctgatattatcattatggttatgatttttatattggcaggtgcctttgcttcagcggctgaagcgatgggggcggtgcattcaactgtcaatcttgctttgagcgttattccgcagcagtttttgctgccggggctgtttatcattgcttgttttatttctatatcgatgggaacatcaatgggcacgattgcggcggttgcgccgatcagcgcgggtttgagcggagagcttggcatctccggcgcgattacgatggcggctgtggtcggcggagctatgttcggagataatctttcttttatttctgatacgaccatcgcgtcagtccggacgcaaaaaacacaaatgatggataaattcaaaacgaactttctgattgttttgcctgctgccattgtgactgttattatcttattttttattccggcaggccacgccggccatacgggtgctgaatcttacaactggattaaggtgcttccttatgtcgccgtgttggtttttgcgttaatcggtattaatgtgatggctgtcatattcggcggattggttttgacgggaatcatcggattagcgggcggcagcctgacgcttgactcttattttaaggcgattacggatggaattgccggaatgagcgatctgatcatcctgtccatgctgatcggcgggatggtcggcgtgatgaaacaaaacggcgggatcgactttttactggagttcatcacgaaacgaatccgttcgaaaaaaggcgccgaagccggcattgccggactggtcagcgtgacgaatctggctgcggccaataatacgatctcgattatcgcagccgggccgattgcaaagaatatcgctgataaattcaacatcgacaacagaaaatcggcaagtattctggatatcttttcgtgcatgattcaaggattgattccttacggcgcgcagctgttatcggccggaaaattcgggaatatttcaccagtcagcatcctgccatactctttttatcccgttttaatcggaatctgcggcatcgccgccatcatatttggactgccgaaattcacaagaaatacgaaataaaaaaaggcgccgttcggcgccttttttctttcatgacagccaagcatttctcaaaagctgtacgccccgtgcgatctgatccgtatcgagatgggcgaaacctaactttatgatcggcggttcgggtttttcggcaacgaaataaatggcggtagggtataccttcactccgtactgaaaagcgcgttcgattaatgtttcttctgtatagttcaggtgaactctcaccaatatatacaatcccgactgctcgccgatgatcgtcacatgatcgccgaactgctgctttacatgtgaaatcaagtgctgcatttttcgcctgtaaacaatgcgcatgcgcttaatatggcgggtccattcaccggccttcatcaattcagccatggtcagctggttaagcgaagaagcggtgctttcgaaatgaataaaccgttttttataccggtgcaaaaggcgctgcggcaaaaccatatagcttatgcggatgcccggaagaaaggattttgagaaattccctaaataaatcacccggtctgattgaatggaagcaagagcgggaaacggctgctgtgtataacggaattcactgtcataatcatcctcaagaatataaccctctctatgattcacccaattgatcagcgtttggcgctgctgaatggacatgcttacgccgtaagggctgtgatgggatggggtcacatagattaatttttctttcattgcatgtaattgagaaaaatcagctccgttttcatagacaggcatcgtttccagagaaagcccgtgaaattgaaaagccgctctggcaccgtcaaatccggggtcttcaacgatcattcccgaaaaatcttctttcagaatccggctgagatatatcagcatctgctgcgtgctgctgccgatgataatggaatccgcatctgttttcactccgcgggattccaagagataagcggcaatttgttcacgcaggtctctctcgccgaacggttcaccgtacaggaagcttttctctgatgtcaaaacttgattgtataattttctccatgttttcagaggaaaatgcttttgatcgacggctccggcgcgaaagtcaatcaggaccggctgagttgattcggttttttcagcgtggacaacatcgttttctttttgaaataaagaaggttctacttcatttacaaaataacctttgcgtgtttctccgcgaatgtatccctccgctaaaagaagatcataagccatcagcgttgtattacggcttacccgcagggaatctgccagctcccgaatcgaaggcagccgctcatctgcctgaatatttccctgctcaatcaatgttttaaattgttcgtaaatttgtttgtatttcggggtgtcgctttcgaaagcgaaaatcatatttttcatcagatgttctcctctgacatgtgtatttatttgaaactgtatctttttaaatgtcagttgatatcttattatagcggaaagcgctttatcaatccatttcagagaggagagttttgtatgtatattccggctccatttcagctgagtgaagctgaagcgtgcgatgtcatcaaagagtatggtttcgcagcattgttttcaacggcgggaggcatgccgtatgcaacccacctgccattgatgatgagtaaggataacgaatgcttatacggtcattttgcattgccgaacccccaatggaaagagattgatggccaaaacgtgttagccgtttttcaagggcctcattgttatatctcgcctaaatggtatgagacgaatcaggctgttcccacatggaattatgtggcggttcatgtttacggagaggcggagcttttggatgaggaagaaaccgtgcagtcgatgagtgatctcgtattgaaatacgaaagccccgacagcccgtacaaattagaggatgtcgatgcgaaattgctggcaggcatgaacaaaggggtaaaaggctttaaaatcaaaatcagcaaaatagaggggaaagcaaagctgagtcaaaatcattcagctgcaagacaagggctggtcgtacaacagctcaaacagattcctcatacaaacgaacagctcatttccggcttgatggaagaaaacatcaaacggatcactgcgaacaactgacaagcatgttaaaaacataccggcagcatgcgcaggttatgaagcttttctcaggatgaataacgactcaaacagcacataaatcaatggcgccattaaaatgaagaaagaatgaaaaatagcatacggtatgagtaagtaaacgataagtttcaatagaatggtagacggtttattgaatgtccagcggttcttcaagatatcagtcatacaagctaaaacaaggccgaccgtcaaatatccggctgcgatgtaaagataaataaaaaggtaaaacgggtaagaagacaacggcggtgtgtcttcctgtgtcaattttaaacccacataaaagaccaataaaaagcaaacggacgaaacgagagctaacaaaaggtgtttatataaatacttcttcatgtgtttcacctgcctatggcgcaattatttcttaacatattatgacatggttttaccgtttctgctatgtgagcggggcgtaaagaatcaatatcatctttttatgaatccggattttttgttcggatggatgtaaagaagaatacatcaaaaaaagctgtcagcttggttctgacggcttatttttggtgaatggcttatttctccgtggtgaaataaagcaatgcgatgaccggaaaagcgattccaatccataatgtgatactccacccgcctgaggcgtatgcccatcctccgattgatgatcctacagcgccgcccagaaagaagatggccataaataatccgtttaatcggctgcgaaattcaggtgccaacgaaaaaatagcacgctgactgagtaccagattggcagatacacccatatccaacaggatagctgcggccaccagaactgctatgccgacgtgggagctgctttgaatcatgagcgggagtaataaagaaacgatgacagcaccgagagcgattccggtggcaagccgggtcaggccgcgatcagccagacggccgcctatcggtgcagccgctgcacctgcaatgcccgctaatgcgtacagcgcgattgccttttgagaaaaatgaaaagcaggaccggacaataataaaggtacagtcgtccagaacaggctgaaagcgccaaatacaaacgcatgataaatggcacggcggcgtaagaccggagtcgtgcgcagcagcttccacattgagccgagtaagacggtatagcttgtgtttgctgttggttttctgacaggaagcacttttgataagacgattgccaggacaacacttaacgcggcggataaagcaaatatggcattccacccccatatatcagcgaccagactggatatcggacgggaaagcataataccgagcagcaggccgctcatgacattgccgacaacccggccgcgtgcggcgtccggtgcaaggtatgatgcgaacggaactagcacttgggctgcgatggatcccagtccgatgaaaaacgcagcggctaaaaacagtgttccatgcttcgcaaatgctgtcagtgtcaaagcggctgcgcttagaaggagcgatacaacgacaagttttttgttttcgataatgtctcccaaagggacgagaaacagtaagccggcaacgtatccgatttgagtcagtgtgacaatcagtccggcgctgcttggagaaagcccgattgccgcactaatgattcctgccaagggctgtgcataataaagattagcgacaatgattccgcatgcagttgcgagtagaagggttaaaccagctgaaattccctgatctgctgtctgtttgttttctttagccatatgaatgaactcctttttaagtggtttttatgatgcttgataaatgatttgctgattcatctcctttacgcagaggctttaggagtctgcatttcatcatgacttccctcaggttactttgtaaactaaacgtttagttttattataaacaaataatatactaaacgttcagttttgtaaatgggtttctgttttctttttttatacaggttaagtatactgaacgtatcgtttataattcgggaaggaatgattcatgtgcagagtaaacgaggacggccgcgcgatgaaggaacacataaggcgattctttctgcagcctatgatctattgttggaaaatggctttgacgcggtgacagtcgataaaattgctgagcgtgccaaagtaagtaaggcaacgatttataaatggtggtcaaacaaggctgccgttatcatggacagctttctttcgaccgctacggacagactgcctgtgcccgatacaggatcaacagtgcaagatatattgacccacgccacgaatttagcaaggtttttgacgagccgggaaggaaccgttattaaggaattaatcggtgcggggcagctggatgcaaaattggcggaagaatatcgcacgcgatttttccagccccgccgcctccaagcgaaaggccttctggaaaagggaattcaaaaaggtgaattaagagagaatcttgatattgacgtaagcatcgatctcatttacggaccgattttctatcgtctgttgatcacaggtgatgaggtgaatgattcctatgtgcatgatctggtgatgagtgcgtttaagggagttcagcctgcctgaaaaatacccggatcatgtgaaagagatacagacttctgctccctatgggcggaatataatgaaaaggccgaacaagttcattgttcggccttttctgattgatttgcgaaccgccgggcggccgccacgcaagcgataacgccggcattcaccgccgcaagttcccatcctgctttttcatggagaatcatggcggccagtaacagtccgaagaaaggctgcagaagctgcagctgtccgaccgcggcgatgcctccctgggcgagtccgcgataccagaatacgaagccgatcagcatgctgaatattgagacatatgcaagactgagcagtgcgggcgcgccgatgtttgaccatgagtccggcatgaagcagaaagacaggatgaacataaggggaagcgataaaacgagtgcccaagagatcacctgccagttgccaagccgccgggagaggcgggcgccttcagcataaccgagaccgcacacgataatcgaagcgatcatgtacgtatcaccgagcggagaggattctcctccttgcagcagagcatatccggctacgaggatgctgccggcagccgagaaaatccaaaagaccggcctgggccgttcgcctcctcgcagtacgccgaagatcgccgtcgcaagcgggagaagcccgatgtagacaatggcatgagcggatgtgacatgctgaagcgctaaggctgtaagcagcgggaaaccgatcacgacgccgagcgctactgttattagtgaaatgatgtcgcttttagcagggcgtttctcctgaaaaatgaggagcagagcgcctgccaatataccggctatcgcggcgcggcatacggtgagaaaaaccgggtcaaagtccgctacagccaagcgggtcgcaggaagcgagccgctgaaaatgagcacgccgataaatccgttaatccagccgtttgcggctttcttcattccaatcactccaatatatatttctaaacccattttcaaagtttataatgactataaactgaaattggccttatacaaatggccagtttttataaaaagaagaatgccagtttggagggagtaaaaatggatatcacgccatttttaaatagagatctgaatattccgatttatcagcagctttatcggcattttaaggaaaatatgcatcagggccgtcttcctaaaggactgaagcttccttcaaaaaggcttttgtcaagtcagctttccatcagtcagacgactgtggagcgggcctatgaacagcttgccgccgaaggctatattgtcagtaagccgagaagcggatggtttgccgattatgactcggacgccgtctatgtgaaaaagccgggcgcttcgcctgttcaaacaaaggcgaaggaagactgccaatggattgattttcactacggcactgtggatgccgctcattttcccttttcggcatggcgcaaaagcatggttgcaagcttagatcaatacgggcatgagctgtatcggcccggggatgatttgggcgagcttgaattgagaacgctcatttcggagtacttatatcagtcgcgcggcgtgaattgtcttcctgaacaagtgatagtcggcgccgggaaccctgctcttttgcaaatgctgtgcaaaatatttgaagtaaatctatccatcggatatgaagatccgggttatccgagagcgagggagatttttaaagtcaatcacatgaagatcattccgatacccgtcgatgatgaaggagtctgtatccggaagctgaatgaagagcggccgcgtcttgtatatgtcacgccttctcatcaatttacgttaggaacgattatgccggtaaacagaaggattcagctgctgaaatgggcggaggaacatcaatcgttcattatagaagatgattatgacggagaattcagatacaacggccagccgatcccatcattgcaggggcttgatcagcatcaccgtgtcatttatatgggaacgttttcccaatctctgcttccttcgctgcgcatcagctatatgattcttcctttgccgcttatcgaaaaaggcagggaaatcgcttctttatataaacagaccgtttcctgccacagtcagctgacgctggctcaatttatcaaaagcggagagtggcagaaacatattaacagaatgagaaagctgtaccggaaaaaaagagcggtattattagaggccgtgcggcgcgagttgggacaatacgtcaggattcgcggagaaaattccggactgcggattttacttgacattcagctgcctttcagtgaaaaagagctgattgaaaaggcggaggaacaaggcgtcaaaatctatcccgtgtctctcacctatcaaaaacagctccctgaaaaaacagtttctctcggtttcgcgggggtttctgaaaccgatatacaagaaggcataaaaaaactgagagccgcctgggcgctgtaaaaggcagctcacagtttgaaatactgaagcttgagtcaggggtgctgtctcagcagcaaaacggtttataggacgggcaggcggagcgccgtatcaatattttgtaaattaaaccggacttgttcatctgtgttccacggatgataccagcctttttccatcatatagcgtgagatttgctcatgcatgtcgatggcttcttctaagtgacgggtgaggatcgctttcacttcaggcgttccggcttccgtcgccgccatcgcatagtttctgacaccgctttttgccgaattcaataaatccattgcgacaatttggtctgtcagtgcattcattcccgtcaagtattcaataatcggattcattcgtcattcatctcctcattcatgctgtgcatcagataaaatcgaggcaaactcctgcaattgccttgttgatgtatccgcatcctgctgcatgatttctttcagctgcggatcggatacgagcgctttcatggttttggacttcgtcagacaaagtgacttaaaagaagccatctcctgaatttcgagtaattcatgtaaggcgctggccatttctgtagcctccgttctctaaggtttgagtacaacttttatgcaatcatctgttttcgtgtcaaacatctcatagccgtgcttcgcttcgctgagcggaatgacatggcttacaacatcgcccggatcaattttgccggttgacaccagttcaaacatatacggcatatagtggatgacgggagcttgtcctgatcggatattgacgtttcgctgcatgatatcgccaaggggaaacccgttgtatctgccgccgtacacgcccgtaatctggatcgttccgccttttcgcaccgcttgggacgcgatgaccaatgcgctcatcgccccgccttgaagttttaatccgctggcgaggaactcaaggtctgtcattttcccgtccatgccgacggcatcaatgacaacgtcggcgccgcctttagtgatttccttcaggtagctgcccgtattttcgtggtcttcgaagttcacgagttccactttattcgtccgtttcgcatgctggagacggtagttgacatagtctacggctattacgcgtttcgctccctttaaccagcagaatttttgagcgaaaaggcccacgggcccgcagccgagaacgataactgtatcgccttcttttacgccggcattgtcaacgctccaaaagccggttgtcatcgcatcggaaataacactcagtttctcatccggttcttcgcatgtttcgggaactttaaaatgggtaaagttcgcaaatggaacgcgcaaatactccgcctggcctcccggatagccgccggcatttcctgaatagccgaaataagcgcctatatcgccgttctcatttgattgatcacattggctttccaggtgatttttacaataaacgcattctccgcaggcgatattaaaaggaataatgacgcggtcgccttttttgactttcgtcacgccgggaccggtttcttccacgatgcccatcggttcatggccgatgatgtagtcttcctgcaaattcgggatgagtccgtggattaaatgtaaatctgatccgcaaattgccgtacttgtgacttttataatcatgtcatcgtgtttttcaatcttcggatcaggcacgtctttgacaacgacgtttttcactccttgatacgttacggccttcatgctgtaatacctccagtgttagtgttcatcaggtgtgcggtcaaacatcccttttctgtttgtttcaacgggaaacaggttcatatttccgaccatgagggtatttttcgcagagagctgatccaatttatactgttcgctcagatcatgcgggtgaaaccactttttgctgaccatcaagtctgttatctcctgatgcatcgcgattccctgcatgagctgtttgcgcagcaaagctcttacatcaggtgaagcggtttctgttaaagcgacggcggtatttctgatgccttctttggcgcgtatgagaaaatccattgcgaatgtcatgtccgcaagttcagggacatgtaatgaattgatcggatctaaatggtcatgattcaatgatgcttaccttcctttcaattgatgatcgaagtcggccggttttgaggaacgggagcctgaaacgttgcccgttcataaaccgcctgcagatcagccaggtcttgagaggcttgctgaacgtctttttccattaacgttttcagatcctgatcaaacacaagcccttgcatgagcttggatttcgctacacaaagcgtcttgaagttaatgatttcatgtaagtcaagcgactcgtgagccgctaattcacgcttttccataattatctttaaacctcctcttctcaattacgtaattaatttcccctgagaaaagaggtctagtcttacaaattttgtttatcagaaaaagcggagagtcaaaaaaaagaggaagcacaatcgcttcctcttgttcacatggaatggctgttggtgtcatgaacgtttttctgatgcgcgggcggttttgccgcgcgggagacgagcccgctgaaacccgggaaaggtcataaaaaagatatgaacaaaaaagcagcttgcaaacaatcccgcaggctgttttttctttcacccgtcatgcaggaaagaaggggaaggtgagaagcaggcacttatggtatgatgacaaatagaataaaacctcgtgaggccggtcggctaaaaggaagtggacagagattgtttggtacaaaacatcaagaagactacgtctcccgtgacagacgttcattgcatatgcttgcgcttcgggtgcccggtctggcgtttatttttatggtatatgccgcatcagtctctttgcagtacatttatgaaagctggacggtttttttgctgctgttattcacgatattgatcgtcatttttaccgtgctgcactggcattcccatcgctgggtgaagaaaaagacgtttctttatttcatcatacagggatttatcatatatacatcggctaacttgatgaccggcggctatatcgcggttgtcgtcggtctctatgcctttttaatcgggcagattatcggaatggcggataagggaaaaacgctgctcatactctatcttttcattttaatgtccatagcagccctgcaccaggagcatccgcatcatctgctacgtttcatcgttatcgccgctcccatcatgatcgtgattatcacgtatgcggccacatttttcgcgcaagttgatgaaaaaataaaaacacagatgacgcttgaaaaattagagctcgctcaccggcaagtgaaacagctgacgcttcagaatgaaaggcagcggatggcgagagacttgcacgatacgcttgctcaaggattggtcagcttgcatatgcagcttgaagcggtgcatgttcatctttcaaaagacaacactgacagagcgaaagacatcatccgccagtcaatggacagagtgaaaggcacattggctgatgcgcgctcggccattgacaaccttcgcagcacatcagaaaagatcgggttcttaaaagaaagcatcactgaacaaatcaaccattttacagaagcctccgggctgtcttgttttttagattacagcgtgcatcatgtgcttgacgttcatacggcggagaattgccattacatgatcggagaaggcctgacaaacgccgccaagcatgcagaagcaaagaatgtctgggtatccgttcaagaagaaaagggacagatccgcataaccgtcaaagatgacgggaaaggttttgatgccgggacaaaaatgagaaaaagcggacattacgggctgcttgggatacaagaacgcgtcaatatgatgaacggcactttccgtataacaagcgccagatcagcgggaactcaaattgagatcatcataccaattcaaggagaggcggaacatgtataaagtgttaatagcagatgaccatcttgtcgtcagagaaggtctgaagcttttgatagaaacaaatgaccattacaccataacgggagaagcggaaaacgggaaaaccgccgtccgcctcgcaaaggaattaaagccagatgtcattctcatggatctgtacatgccggaaatgagcgggctggaagccattaaacagataaaagagcattctgatgtgccgatcattattttgacgacctataatgaagatcatctgatgatagaaggcattgaatcaggcgcgaacggttatctgctgaaagatacaagctcagaaaccttatttcatacgatggatgcggcggtcaggggagaagtgcttctgcagccggacatcttgcggcgtttccgggaaatgaaaatggaacgggcaaatgccaatgaaacacagctgacggacaaggaaatcatagttctagaagccgttgcgcaaggacataaaagcaaagcgatcgccttcgatttaggaatctcagagcggacggtaaaagcgagattaacatcgatttataacaaattaggcgctgattcgcggacggaagccgtcactattgccatgcaaaaaggcattctgaaactgaatatataatgaaaaactgcccaaacgtacatgcccctatgtacgttttttttatgtgaatgtgaactacaattaggcagaaagtaatgattggagaggagtattcgatgtctggttttttatataaattagggggatggtctgcccgcaaccgattaaaaatgatcagtgcgtggctcgtgatactgatcgcttcgattgtgatcgccatctcgttaaaacctgctttttctgaggatatgtcaattcccgacacaccttctgaaaaggcgatggatatcattcaaaaagaattttcaaagggtcccgataaaggaagtatacgggttattttcggagctgaagacgggaagaaattgacgtcaaaaccggaaaaacaagcgattgaagagacattaaagaagatcaaaacagatcattcagtcgcttcgattgcaagtccttttgagacaggaaccatttctaaagacggatcagtggcatatgccgatattacgtacaaaaaagcggcggatgacattacggatgcgtctgtttcacatattaaacacagtctgtccgccgcaggagacaagggtctgcagacggagctcagcggcgatgtgccgggggccggtgttgaaatcggcggtgtatctgaaattgtcggcgttgtgctggcattcgttgttctggccattacgtttggttcattagtcatcgcggggcttccgattgtcaccgccctgattgggttaggtgtaagcgtcgcgctgacgttaattgggacacagttctttacgatagcctcggtcagtctctcattatccggaatgatcggactggccgtcggaattgattatgcgctgttcatctttacgaagcatcgtcagtttttgggcgaaggtgtacaaaaaaatgaatcgatcgcgaaagccgcgggaacggcaggcagcgccgtcgtttttgcgggactgaccgtgatcgtcgcgctttgcggattgactgttgtcggcattccgttcatgtctgccatgggattgactgcggcactcagtgtgctgatggctgtattggcatcagtaacgctggtgcctgcggtgttgtcaatcgcaggaaaacgaatgattccgaaatcatacaagaagaaagaaaagaaaagcgccgacacgaatgcctgggggcgcttcgttacaaagaagcctattctgttaagcattttcagcatcattcttttagccgtcatcagtctgccggccatgcatttagagctggggctgcctgatgcgggaatgaaagcgaaagacagcccggatcgccgcgcctatgatctgttgtctaaaggattcggagaaggctttaacggcaagctgacaattgttgccgatgcaaaaggggtcaaggggaacaaaagtgaagcatttcaagacgccgtgaaagaaatgaaggacttgcacaatgtggcgagcgtcacaccggccatgccgaacgaaaaaggggactatgccattattacggcagtgcctgaaaccggaccgaatgataaggcaacgaaagagttagtgcaggatatacggaaactgtcagacaaaaacggcatccgcctgctcgtcaccgggtcaaccgcggtgaacattgatatttcagaccggttaaacgatgcgattccggaattcgccattctcattgtcgggtttgcgtttgtattgctgaccgttgttttccgctcgcttctcgtgccgcttgccgccgtcgtcggctttttgctgacgatgaccgctacactcggcttatcggtattcgtcctgcaggatgggaatttcaccggcttgctcagcattccggaaaaaggcccgattctcgccttcctgcctattttagcaatcggtattcttttcgggctggcgatggactatcaagtattcctagtcagcagaatgagagaagaatatgtcaaaacaaaaaatccggtacaagccattcatgccggattgaaacatagcggacctgtcgtaacagcggcgggactgatcatgatttttgtctttgcgggattcatctttgcgggagaagctacgatcaaatccatgggcttggcaatgaccttcggtgttctttttgatgcgttcattgtaagaatgaccattattccgagtgccatgaagctgatgggacatgcggcctggtacttgccgaagtggctggataaaatcattccgaacgtggatatcgaaggccataagctgacacaaggcaaaacaccggagaaaccggaagaataaaatgaaaaagcagatcgttatgatctgctttttttatgtgctgaccgcatccatgaaaagagaaaaaagctttttcatgtcttcatgtttttttgtcagcatttcaggatgccattgcacgccgacgacaaataattcacccgtccgttcaatcgcttcaatggccccgtctttcgcataagccgccactttaaacaaaggcgccgtctcttttatgatctggtgatggaatgaattcacccgcgctgaatcaccaaacaaggaatgaagacgtgtccctttttcaaaagaaacatgatgggtttttaacggcggatctttttcttgatcatgcttaatgtcagcaaacgaagcgtgtgtcaggtcttgatataaagttcccccgtaagtgacgtttaacatatgcatcccccggcagatggccagaatcggcttttctaaagcaaccgccgtgagaatcagctccttctcgtaggcgtctcgatcaggaaaggtctttcttaaagcctgtaaaggttcttcgccgtaaaacagcgggtctatatcctgaccgccggacagaatgatcccgtcaacatgagagacctgttcctttaaaagcgccgtctcttgaatcaccggcaatataaacggcacaccgccggcctcagaaacagactgaatataatcattattgacatatgccctattataacccgggaaagggccggattgatcagccataatgtttcccgtaattccgatgcgtttggccattcttcgcccccctgaaccatgctcataattaatctgaacgtaggttgtacaaatcagtttgaaattattcttcatgatacgtgagctttccaaaacaaaacccgtgacaatcacgggtttttacattcatttcaatttcttgatttcttccgtcagctctttgaatttttgatcaagctcacgatattgtttatcagccggagtcatgaagctgagttttccgaggacttcctgccgttcggtctcaagctttaatcgcagttcttcagcatcgtctctgacggagggagattctttccattgttttcggacgctgccgtttgagatatcaagccggatgtccgtcgtcttttcgacaaagtaacgatcatgagatacgatgatgagcgttccgtcgtatcgggccaaagtgtcttcaagctgctcgcgtgacggcagatcaaggtggtttgtcggctcatccagaatcagcacatctttctcctctaaaataaacgccatcagtttgcatttgacccgctctcccatgctcatcttgccgatgggttccgtccattgcgctgcggtaaatcctaaatgcttcatgagggattggacatttcccctagcttcgaacgtttctttgtaaaaaagctgttcgggggttttatcaagcggaaggtcgaatacttcctgcgttaaatatccgacgtttgcagacggagaaatccatatgccgccctgcgctttttcctgaccgaggatgaccttcaataatgttgttttcccgctgccgttcgggcctgtaatcgcgatcttttcaccgtgcatcacagtgaaattcacgtttttgaaaagcgttcgtccgtcatatgactttgtgacatcccttacttctaaaaaacgctttcccgcttttttgcggtgctcaatggaaaaacggacttcatactccgcttcaaccggttctgctttcgctttttcaagctctttttcaagacgcttctgctttgatttaatctgggcgtccgtgcgttttgcttttacgcgatggtattctttaaagccttctattttcgttgattgggcgtgggctttttttgaccaggcgctcagctcgttcatttgagcttcaatccttttgaccatattctgctgattctcatattcgcgctgctgtgtcagccttctctgtttgcggacctccatatagcttgaataattccctttatgttcaatgagtttctttccttcgatggcccagatttttgtcgccgctgcatctataaaagcacgatcatgcgaaacaaaaataatggtgcctttgtaattcttgatctgatttagcagtatttctaaactgtgctgatcgaggtggttcgtcggctcatctaataacaaaaggctgcttgaggaggagaaacctttggcaagacgggctttcaatttttctccgccgcttaattgcgaaaaggcgcgtgcgggtacgttccacttttctaacaaggctgcctccgcaggctccggatggccggaatcataagcttctgtttcttgttccaccatatatatgttcacatcttgcatcatctggatctgtccttgtgacggcgctttttgattgcagatcaattgcagcaataacgatttgccggcgccgtttttaccgataacgccgatgatgtcaccttgctgaacgctcgcgctgatttgttcaaaaaggggaacgctgttgatttcataactgatgccgcttatttttaacatttctttcatatgtcaatccctcgctttaaagggaggaccaaaaaaatcctcccaattgatttggaaggattagccgtacctgtgcatgatcaaataagctatttttacatagctttcgtatcgtatagaaaatgggcagactaatcctattttttctgatttgaaatatttgatttcaaacggtcaaaataagattagttaatcattgtccacccatcatcccttcgtatttgttacaaacagtgtagcacacacttatctgtaaaagcaaagggtataagcctttttattccagattggagacttcccattcttcttctaaaacggcataataatattcgtcccaccattcattatcatgggggatgcattttttaaaaaagccttcccgtctcatcccgatcttttccatcacccggtgcgaagccatgttttccggctgacatgtcgcaatgatccggtgtaatttcatcttgttaaacccgaatgccagcacggcgcgcgccgcctctgaagcatatcctttgccctggtattccgggtgaaacacccagccgatttcatacgtatgatcgccaaaatactgaaaaaaagcaatgtggccaatgaccgttttctcatccttcaataaaacgggaaacttcccggcatgttcaccgctgttttcagtaacgaatttcctggcatcttcttcggtaaagacaccctctggtatatatttcatgacattcggatttgaggtgtacgcatagacatcctgccaatcttccggttcaaatgtccggattacgagcctgtcagttttgatattcattttttatgttcctccatcaaaaaaggtttcatttactacttcgattgaaagatgtaaaaacctttaagcggggaagagccgaataaaaaaagcctgcagctatacactgcaggcggttatttttcatttccggcggcgggcaggtttgtaaacccgaattgccctccgacagcttcttttacttcatgaataacgataaatgatttcggatcaattttttgaacatgttttttgattttcagcaattcgttctttttaatgacaacatagataatgcgcttgtctttgctgccgtaatacccgtatccgtaaaaaatcgtcgccgcgttgccgtactcggaggtgatggctttggcgatttcttcgtattggtcagacataatggtgagagcttttttattatggaaaccctcaatgacaatatcgacgattttggcgcacagatatacgaatataaacgtatacagcatatgattgataccgatcgctaaaacggatgcgaaaatgatgacacaatccatataaaacatgcttttggagatgttaaagccctttgtgtaatttaataaatacgccaacagcgtggtcccgccggtagatccgtcagcgataaagatcaatgccagccccgctcccatcagcagagcgccgaatacaatcccgagcaccatatcgtgcacgccgaacggaataaagctgacgatgctgagaaaaacagaagtcattcccgtaccgagtatcgtgtataaaatcgtttttttcgttaaaaatttataagccagcccgataaaaatcaaatttacaaccagagtcgtaatacttgcaggtatatggaaaagataatataacacgagagcgattcccacggtgctgccgtcccctaaatgattcgggatgacgaaaaattccacggacgccgcaataagaaaggctccggccataatcatcagtatatccttgcaaatgttcttcatgtgcaaacctcctccgcagtcaaaaatatataaaaaacaaaaacgcctcaaaaattatccagcagaactaaataatttttaagacgaatcattcacaatctcgtttgttcattcagtaaagaatgatcagcttcaatatcgaagattatatagacaccttcacatcttgtcaatgtcgtgaaaattgatttttctgcagtgtatatgaggtttaaatcaagttaaaacgaggaattatatcagaagagttttcatttctgctctatcaataagagaaatgtaatgagagacaacgaagaagggatgatgacattggaacgaatttttatcagtccggccaaatacgtgcagggaaaaaacgccattaaaacgatcggcggacatctggagggcgttggtgaaaaagccgtcgtcatcgcggacaaaaccgtatgggatatcgcgggccacaaggtgacggctgaattaaagaaaagcaatatctcttctgaagaggcggttttcaacggcgaagcctcccaggaagaaatgaaaagaattgccggcatcgcagaaaaagcaggcgcgactattgtcatcggagtcggcggcggtaaaacgcttgatacggccaaagccgtatcagatgaaataaacggctataccgttatcgtgccgacggccgcttcaacggatgctccgacaagcgggctgtctgtcgtgtattctgaacaaggcgcgttcgaaaactatcgtttctatcataagaatcctgacctggttctggtcgatacgaaaatcgtcgcggaagctccgccgcgctttttagcatcagggattgccgatgcaatggcgacgtggatagaggcgcgcagtgtcatcgccaatggcggtaaaacgatggcaggcggaattccgacaatcgccggagaggctatcgcggaaaaatgtgaagcggtattattcaaatacggccatctcgcttatgagtctgtgaaagcgaaagccgttacgcccgcattggaagcggtggttgaagccaatacacttctgagcggactgggatttgaaagtggcggcttagctgcggcacatgccattcataacggatttaccgcgcttgaaggtgaaatccatcacttgacccacggtgaaaaagtggcattcggcacgctcgttcaattggcgctggaaaaacgttcgcttgaggaaattgagcggtatatcgcgttttatatcagcttggggctgcctgtcacacttgaagacatcaaattgaaagacgcatctaaagaggacattatgaaagtggcagaagccgcgacgattgaagaagaaacaattcatgccgcttttgacgtgacggctgacgacgtggcggatgccattatagcggctgatcaatacgcaaaagcatttaaagaaaaacacgcgtaaaaccttttaccgcgtgacccggacccaagggctgttacagcccttggtttttttgcgccctttgaaaacttttaaaaataaagaaaaaattatgatacaatatacaaatgttttgagagattgacaaaggaaaggtgggaacgatatgctgcataatccgaccggtaaggagcggcttgcgctggcttttcttctcggaatgcttgcgatactggggccgctcaatatagatatgtatctgccgagtttccctgaaatcgctgaagatttaagcgcccgagcatcgcttgtccagctcagtttaaccgcatgtctgatcggactgacaatcggacaggttgttgtcggcccgttaagtgacgcgaagggaagaagaaaaccgttattactatgtatttttttatttgcgttgttttctctgttttgcgcacttgcaccgaacattactacattagtgattgcccgttttcttcaaggattcaccgcttcggcaggactcgttttatcccgtgcaatcgtcagagatgtgttttcgggaagagagctttctaaatttttctcgctgctgatggtcattaccgccgtcgcgccgatggtggcgccgatgacgggaggcgcgattttactgcttccgtttgcatcatggcatacgatttttctctttttaacctttatcgggtttttgcttgttcttatcattgcgctcaagctgacagaaaccctgccgccggaaaagcggattccgagctccatcggaaattccgtgcggacaatgggaagcctgctgaaggatcggtcatttatcggctatgcgctgacggtcggttttattcacggcgggagctttgcgtatgtctccggaacgcctttcgtgtatcaggatatttacggagtctcgcctcaggtattcagtgttttattcggcataaacggtctggcgatcattaccggaagctttatcatcgggcgtttcggcgggatcattcacgaaaaaagcctgttgagaatcggcgtgattacagcgatgacggcgactgccgttctgctcgtcatgacgatcattcacggaccgctggcggcactggtgatttcaatttttatttatatgattacgatcggcatgacgctgacaagcacctttacattggcgatggaaaagcagggacaccgcgcgggaagcgcaagcgcactgctcggcatgcttccgcttcttctcggttccatcgtgtcgccgcttgtggggatgaatgaagcgacggccgtcccgatgggggcaattatgttcacgacatccgttatcggttccatcgcttttttcgccttaacaacaaaaccggagaaagcaaaaaaggagtgaaatgattcactcctttttttgatgcccgttattcatatttcttcagcacgatcgccgaattatgcccgccaaagccgaatgagttggaaaggccgatcgttaacgattgctggcggggcccgtctgctacatagtccaaatcacatgccgaatcaggggtttgcagattgattgtcggggggatgatgccgtgtctcaagctctctgtcaaagcgatggcttcaacgccgcctgccgcgccaagcatgtggccgagcattgatttgttggccgtaaccggaatatcatacgcaagctccccgaataatgtcttgatggccaatgtttcagaaagatctccggcttttgtgcttgtcgcatgggcgcttacgacatcaatgtcttccgctgaaacattcgcctttttcaaagcgtttttcatcgccaggtatgcgcccgttccttccggatgggaggccaccatatgataggcgtcagagctcgcaccgtagccgagcacctcacaaaggatcggggcatttctgccgattgcactatccaatgattccaatactaagatgcccgcgccttcactcatgacaaatccatcacgatccgcgtcaaacggacggcttgcagcggcggggtcttcgtttctcgctgacagcgcgtgggcattgccgaagctggctaatgacaaattcgtaatcgccgcttccgctcccccggcaaacatgatatctgcgtcatcattccggatggcgttgaatgcttccccgatcgacgtattgccgatggaacacgcggtgacgggagaaagtgaggggccgagcgcgcctaatctgatgctgatttgagcggcggccgcatttgagatcatcatggggacaaggcttgggctcacttttcgcgctccccgttcatttaaagtatgaacgttatcaatcaaagtcgtgatgccgccgattcccgagccgacgtacacgccgaggcgttcacggtcaatctgatcgagctgaatcccggagctttcaagcgcctgttccgctgccgctaaagcaaactggctgaaacggtcaagccgtctcgcttcttttctgccccatctttcttctgcgtcaaaatcaaggacggtgccggctatttttgtcttggagccggagacatcaaacgaatcgatgaaagagattcccgattttccttccgtcaggtgtttccaaaatgtatgcacatcattgccgagaggtgaaatcactcccattccggtgatcacaactcttttcatggtcattcctccttcggtatgtatttattgtaactcgcaattatcctattacaagttgttgattatcctagtataataaataccagggtaagagaggagagattcggtatgataccagaaggaagattgcaggcgctctcagagtttttaaaaacgcagcgggccaaaatttctccgcagatggccgggctgccgatgggcacacggagaagaacgcccggactccgaagagaagaggtcgcgcaattagccggcgtaagcaccacgtggtatacgtggctggagcagggcagagacattaaagtgtccgcagccgtattggacgccgtttccgatgcgctgcagctgaacaaagatgagagaaattatttatacgcgcttgccattgaggagggcgtaaagcagccgtttaccgcggaggaagaagcggttatcagcccgtccctttcaaaaatcctgcaggagctccgttattgtcccaccattatctcggacaggcggtgtcatatcgtagggtggaaccaggctgcggcgcacgtgtttttagattttgaacaaattcctcctgaaaagcggaatctcatagagctattgttttccagaaaagaattaagaagtttagccgtgaactgggagcactttgtgaaaggattcatcgccattttcagaacgtattacggccagtatgtagctgatacgtggtattctcagtttatagaagaaatggagaaaacgtattcggaatttcatacgctgtggaatgagagcgaagtcagctcggcacccgaagtattaattgagttccgccacgcgaaggcgggaaaaatggtctttaacctgacttcatttcaggttcagggcaacagtgatctgcgctgcagtgtgtatacaccggtagatcataccgaaacggaagcaaagctgaaaaagctcttcgaaaacagatgaagaacagaacaaaacgggaggcggccgcctcccgtttcagtttaaaataaaagcatgagaccggcgatggccggtgttaaaaagatggctgatttcagaatgactttcggcacgaggttggtgaatttcgctccgacatatgcgccgcacatcgttccgatcagcactttgaccaacagcatataatcgacaaatccttccgtcacataaccgagtcctccgccgaccgcaagcggaataatgacaagcatggtggtgccgaccgactggcggatggataagcgcaaaagaatcattaagccgatttggatgaaaggggcagagccaattccgaacgttccggacaagattcctgcgatgacaccgagtacaacggctttcacccatatgttcagattgctttgctgtcccgaatcttcttgtgtttcttttacaataaataaccggactaaaataagcagagcagataaaaacagcatgcccgccgtcaagtaatgcagcaaatctgcggggataagggaagtaagcctcgccccgaaaaacgaaccgaatgccgcaaaaacgccgacgatgaggccgattttcatctgaatattgccttcacggtagtggctgaatgcccccgataaacttgtgaaagccattccggcaagggaggtgcctaaagccgtatgaatcggtacgtgaaacagtatagttaaaagtgcaatgacaaaaccggctcccccggcgccgataaacccgagaataatcccgagaagaaacataacgagtataataagcacaatcttctcctccatttagatgcctgatcaccatgttccgctccgctgtatcaggttttaataatcgaccgtagtccgtcgaccgtcgtctaatatctttatgttacctcaaatttaaggtattggcaagaagacgaattgcttttatacagagggtttacagctctttcaccatcactttttcaccattgaagtccagctctccattgaatgaaaagccgaatctttgataaagccgcaatgcgtgcacattatcttcaaacaggcttaaataaatccgtctgcaatcatatatttgagtgagatgacggattagggcatcaagcaacagcttgcccaatccccgtccctgatagcgttcatcaataaaaaaacggtcaagccacactctgccgttttcattttcctcatcatattccggaaaccatccgtacatggcaaagccgaccaattccccgttaacataaagaccggccggctgataatgccggcaatcctcagcatcttgtaagcactcttccgcggtttcaataaatgaagtctggctttcccttacatgaagcgccagtatatcggcacggttttcttccgtgactgttctgatttcaatcgtcatacttgatactcctcttccgctttttttgagacggtaaagctttcattgcgtaagccatttgtgaatcagccttctctcggatacaatgatcatcataaaggatatggttaccgtatagtcaaggaggcattatgagcgaagacgtcagaaaatacttcacaacgggtgaatttgcaaaactgtgccacgtaaaaaaacaaaccctgttccattatgacgagatcggcctgctttctccggaaatcaaaaaagcgaacggatacagatactattcctatcatcaattcgaactgtttcaggtcatcggtctgtttaaggaggtcggcgttcccttgaagcagatcaaaccgctcttaacagacaaaacccctgagggtatcatcacgcttttaaaagagaaatcttcagaaatcgaaagcaaaatcaaaaagctggagcacctgcaaaggatgattcggacaaaggtgaagctgaccgaacaagccttggagacagacttttcctccgtctcattgcagcgattagatgaagagacacttatgataggacggcccgtactccatttgccagaacggcaatatactgccgccatttccgaattgatccgctatatgcgggtacatgagctcgatcaggggcatccggtcggcggactgtttgcgcgggagcagattctgaaaaaagaattctacaactacacccatttttatatgaagacagaagaaggcatagagaatagagacctccatatcaagccgaaagggctttatgccgtcgggtaccaaataggggatgaagcggaagcggcttaccgcagcatcatgcagtttattgaagagtatgggctggaaatgggcgattatgcatatgaagaatatatgcttgatgaagttgtggcggacgggtttgacaatcagatcacaagaatccagctgcaagtccgcaatcgataaagccgatgccgccgttcatttacgtcttttaacagaccttgtataatgagaaaaatcagattgcaattgaggtgaaaaacgatatgtttctagcgcccttatttgaacatgatgtaccggcagcacttctccgcccttaatggaggaaagtgactgtgcttctctccgttagggcatatgacgtgacctaatatgataacggagggtgcatcaagttgaaaaatacattgttcggttcgatttatttggcattggccgccagtatctggggcggtatgtatgtcgttgtaaaagttgtggtagcggtcattccgccgcttgaactggtatggctgagatatgcggtggcgcttctgtcgcttttgattctcagtttatttacacgccaatcctggaaagttcataaacgtgatttattactgatcgctgcgatcggattgatcggcaacacggtttcgatcgtcacgcaggaaatcggcacgaaattatcaaccgcgcagatgggtgcgattattacggcatccactcccgcatttatggttgtatttgcccggctgatgttgaaagaacggttaacgctgaaaaaaggaatatcgacagggctggcgacgatcggagtattgctcattgtggggaacggagatctcaatatgtcgagccagctcggcggtctctcgcttctggctgcggcgctgacatgggctttgatgtccgtgctgatgaaacgggtacccggccattactcaccgcttgtcgtcacaacgtattccatttgcgtcgcatttgtcatcctgaccccgtttacagctttccggcaggattcgctcctccatacacagaaaacaaggagcagaaacggatcatgggcaccggtactctcaaggtgcaatatcctgactcttggggtttcgtcaattaacataacgggcggtgaaaaaatggagccaaaatggcttgaatgggcaaaacagcttcaatccgcggcgcaagcggggctggcttattccaaagacatatatgatattgagagatttgaagaaataagaaaaataagcgtggatatcatggcgcatcataccggcatcgataaaagggtcatcaaagacgtattcgccggtgacacgggctatcccactccgaaagttgatatcagagcggcagtttttaaagatcagagcatattaatggtaagagagaaaagcgacggcagatgggcgctgccgggcggatgggctgatatcgggatttctccgggcgagaccgctgtcaaagaagtaaaagaggagtcaggaatcgacgtaaagcccgttaaactgttagctgtaatggataagaaatgccattcccatccgccgtccgccgcccacgtttacaaagtgtttatcaaatgcgagatcatcggcggccggatcagggagggaacagaaacaagcgccgccggcttttttgcggaaacggaactgccgccgctatctgaagcccgcaatacaaaaagtcagattgaaaggatgtttgcatatctcaaacatccggacgaacccgtttattttgattaaggcagcaagcagaaagaaaagggggcccgagtataatggaggattcaattaaacagcaggcgcagcggcaatttgccaaaaacgccgcgaaatatgtgactagtccaggacacgccgcaggagaggatttggcgtatctcgtttcagcttccggtgccgaaaagcatatggacgtgctggatatcgcgacgggaggcggacatacggctaacgctctcgctcctctcgtacgctctgttatcgcctatgacctcacggaagaaatgttagcagccgctgaagcatttataaccggaaacggatggacgaacgtgtcattcgaaaaaggcgatgctgaaaagatgccgttttccgatgctgctttcgatatcgtcacatgcagaatcgcggcgcatcattttcccgatgtcagagcctttgttcatgaagcgtttcgggttgtcaaaccgggcggcagactgcttctcattgacaataccgcacctgaaaaggatgaatatgaccatttttataatgacattgagaagagacgggatcagagccactttcgggcgtggaaaaaaacagaatggctccgttttctggagacagccggcttccggattgaatccgctgtctgctttttgaaaccatttcaatttaccttctggtgtgaacgggcaggcctgactgaagagaaagccgcattactggaaaaacagatgctggatgctcctcgtgatatacagcggtttttttctgtagaaaaggatcaatcaggccgtattgcgggcttcacaggtgaatcggcctgtttctgcgcgatccgtcccgtctgagacgaaaaaaaccgctgtgcagtttttctgcccgcggttttttcgtattatctgttcttgatttgagaaataatagcggaagtgacatcttccgttgaatgttttccgccgacatcaggagtcagaatgccgctgtttgtgaccgtttcaatagattttaagaggagatggcccagttcctcttctccgaatgaatcgagcattaatttcgccgtccatatttggcctataggattggcaattccttttccgacaatatccggggcggagccgtgaacaggctcaaacatggaaggatatttgccgtttacattgatgttggctgcgggagcgattccgatgcttcccataatcgccgcaccgatatctgtcagcacatctccgaacagattcgaagcgacaatgacatcaaagcgttccggctgcgtgacaaagaaggccgccagtgcatcgatgtgctgggaatccgtctcaatcccggcgtactcacggctgacctctttaaagatgttatcccagaacggcatcgagtgaacaataccgtttgatttcgtcgcgcttgtgacgtgtttccgccgacttgccgccagttcgaaagcataccgcattactctttccgtaccccgtcgggaaaagaccgcgttttgtatggcgatttcgtcctcaccctgatagattctgccgccgacagagctgtactcgccctcactgttttcgcggacgactatcagatcaaaatccttcgggttaacgaggggggaagtgattcccggcaggagctttgccggacgcacattaatcacctgttcaaattcccggcgtatcttgatgagcagcccccacagcgaaacatgatcggggacgagtttttgattccccaccgcccccaaaaacaaagcatcaaagtgctgtaacctttctaatccatcatccggcatcatagtcccgtgctccaaataatactcgcagctccacggaaaagaagtgaaatcaaaggcaatgcctccatgtaattcggcaatcgcattcaacacccgctccgcttgagggactgtttctttccccacaccgtcccccggtatgctggcaatcttgtatgttttcatgtttccgccacctctgaatgaattgttttcggtttacggcagaccgtcgaccgtcgttcatcataattccatattacgccacatccgatatgctgacaagctcgggaatgttgcttccatagataaactgttatatgatcttggtaacaataaggcctaaattgtatgaagaggtaggaaagatggataattttaaattagataagccaatcccgtattatctgcaattttattcccaattgaaaaaaatgatatttgacgggatttttaaaccgggagaacggctgaatgagactcagctggccaaggatttcggagtcagccggtcgccggtcagagaagccatgcggctccttgaaaaggacgggcttttgacggcagacgatcgaaacggctttgtcatttattctttgtccgttaaggatgttgaagagatttataaaatcagaatgtcacttgaatcactggcagtcgaactggttattgatgaagcggctgagagtgaaattgacctcattgaaaaacagctgcgcgagacggaagaagccatcaataaaggcgtcaaagagactgagattatttccttgaacgagacgtttcatcagctccttgtggatttcagccataacagccggctggccatgctgcttgagcatgtcaatgtgctgattcatttttgcagagttcttaattttaaaggcgatgaccgtgcggaggttatcctgcatgagcaccggaaagtctttgaagaaataaaaaagggcgacaaaacaaaagccgtgcaatatatgacggagcatctcaagcatgatgaagaacatctgaaaggcgtgctgagagcggaagaaacagacgaatcatcacgatagacaaggtgaaatgccttgtctttttttgccgatgtcatcgaaccgtcataaagacccgacggatgttccttgcatgattttttccgcgtcatttatgatggatatggaagagacgcaaaaaaggcaaaggagattgaaaaatggcgaaacatattctgatgatcaattttcccgcagaaggacacgtaaacccgacattgggtatgacaaaggccttcagcgaacggggcgatcacgttcattatatctcaacggaaaaatacaaaagcagactggaaggagtaggggcgaaagttcatcttcacagcgatctgctcagaatgacacccattgatcccggcagtccgtccggcatacttgcatttttaaaggttcatatcaaaacgtcactggagattttacatattgtgcagcggctggcagaggacattcaattcgacgccgtctattatgataaattcggtgcgggagagctggtgcgggattatctcaacattcccggcatctcttcttcagcgtccttcctgttcaatgaagaccgtctgaaaatactgccgctccacccggaatcgggcgtgccgtttcagccggacagggaatgtgaagagctgttggccgagatgaaagacaaatacggtgtcgcccctgacagcatggttcaatttatgaacaacacaggtgaattgaacgtcgtctatacaagcagatattttcagcccgaaagtgagacattcggagatgagtatttatttatcggtccgagttttccgaagagaaaagggcgcgtcgacttcccgattgacgcattaaagaatgaaaaagtcatttatatctcaatgggaacggtgctcggggacacggaagcgtttttcaatctgtgcatagacgcgttctcagattttgaaggaaaagtagtcattgccgccggggaaaaagccgatctgtcgaaaatcaaacaggcgccggaaaactttatcatcgccccgtacgtgccgcagcttgaagtgctggagcaggccgacgtgtttgtcacgcatggcggaatgaacagtgtaaatgaaggcattcattatcaagtgccgctggtcgtcatcccgcacgataaagaccagccgatggttgcgcgccgcctgactgaattggatgcaggctataccgtgcaaaaagatgaagtaagcgctgaaaaggtaaagcttgccgcggaagaagtgctgcataacggaaaatacaaacaaggcattcaagccattaatgaaagctttaaagaatgtacgaacatgaaggatgttctcgcccggatcgaccggtttattgaacaaaaacatgctcaataatacatggaaaaagcctgtttcctctgccaaagggaaacaggctttttataatggcttttagatgatgtgatgttcttcatttgcaagtttcacaagagtcagaagagattctgcctcacgtgcgtcgagtgtttttgccagacggtttttttcaaagatctgctggccgaagacattcacagacgcctggtcaaccgccgtgtgccagtccttttgtgaatgattctcagaaaaagagaaaacgaacacggtgaagaccgctataagcatcgccatgacccaaaatttttgccgatttcctgctgctgacataggccgcctcctaaacattttactggtattagatcatatatgagctgtttttaacagagtaaagaagtcattatttcatgtagtccaaatgaaacggagcacagccgaaagcccgccggtcagaccgatgagccaattcatattttgttcatattttattaaaagtttatccaagtctgtcctttacagtagatataaccacaaaatgctgctgaaaggagcctttaaaaaatgcatattcatatgatcaacaaaaaccagtttgagagtgacttggaggcggccggcttcagccgtcaggcagatgatattatcggcaaaatgaaagagtacgtaacggaatacgcggcttcatccgaacggttcctgattgaaattcaaaccgtcatgaacgaatacaaagccgtcgtctgcgcgatgttttcgaccatggaaattgccggtgcaaataaagacgagaagcatgttgaattcgaagcctgcacagtattgtgtgaataaaagacatttatcaaacctccgcggctgcctgaacggcagtatactgactgtgtttcgagaagggaaaatattgaaacttctaaagcggccgttcgtataaaagagtaaatcagcttgtatatggaggttcgtgaaatgaacgataagaaaaaacaagcgtttgaacagcttttcagcactttagacgaaagacatgaaataaacggcgctgtattggcagcggaaaacggccgcatcttataccagggttcattcggcgctgcagaactgaaaacaaagaggatgctgaatgaccaatcggtctttgaattggcctcagtatcgaagccgtttacagctttaggcgttatcattttagagcagcaagggaagctgcgttatgacgatatgatagagcggtggcttcctgattttccttatccgggcattaccattcggcatttactccatcatacgtcaggattgccggactatatggagttgttcttaacacattgggaccgggagagaattgccgttaatcaagatgtgatcaatatgctcaagcagcataagccggatgcttatttcccgccgggcaaggagtggctttacagtaatacggggtatgtggtgttagcggttattatagaaattgtatcaggcatgagttttgctgaatttatgaaacaagccgtatttcatccgcttcgtatgcacgatacgcggatttataacagaaggctgagtaaagaaaacattccgaactatgcatatggctatgtgtatgatgttcattccggagaatatgtgctgccggatgaacttgaggaaactgattatgtcgtctttcttgacggaattcaaggtgacggaaccgttaactccgctattagagatttatatctgtttgatcaggctctttatacggaagaaatcatcggcaaagagtctaaagatcaagcgtttacaccgggctattggaatgaagaagagcaattcggatacggatttggctggatgattcaaaacagcccccaaaaagggaaggttatcagtcacgacggaggctggccgggctattcaactctgatgatccggtatattgaccagaataaaacattgatttatctcagcaatatggaacaatcgtatcaatttgaacaagctgtgattgccgtggctgtaaacatcttatttgatcagccatacgtgattccgaaacgtccggcagatcagaaaaaagcagatatcgatcctgcgatttacagcagatttaccggcaattactcatttcaggatgacacacatgcatcggtggcggtaaaagaaaaccgattgtatcttacaatagacgggcagactccattcgaattattcccaatgacggaaacccgttattttgtcagggcgctgccgcttgaaattgaatttgcaggtgataaagcacaaacagccccgcatttcgttttatatcaggacggcacagaagaaacggctgtgcggatagactgagtgacatgcaaaacaaaaccgccgtcctgagaagacggcggtaatagaaaagtcaaacccctttgatgacgcgaaattttcttttcggctctgacataaatatagaagaaaaaatcatagctccgagcattgtgatgtattccatataaagcgaaacttctgccaaaaccaaccccgcaatcattaaaacagcgcccaataccaccgcaaaaaccttcgttttcatgatgagttccccctattatctgataattgaattatactgcatctccattaatgtgtacattttgtgaacaatttcacctgatgaaaggcaataaagagagagttgaagaattaggagaaatgacaggcaatctttttgttttactgaagaaacgaaagggaaagtgaaaaatcaaaaaggcaaaggagttcttgaaatgaaagcgagactatttttattcagcatgtttctcctgatccccgttctggcgcttgccggatgcaacagccaatcttcaggaggaagcgaaaaagcgaaagacaaagaaacgcactctcacgaagacatgaatcactcaggttcatccgaggtgccgaaaggtttaaagaaggccgaaaatccgacttataaagtcggcagtgacgtcatgattttagcttctcatatgaaaggcatgaaaaatgcgcaaggaaccgtaaaaggtgcttatgatacaacggtttacagtgtatcttacactccggaaacgggaggaaagcgcgtcgaagatcataaatgggtcattcaggaagagctgaagggcgccggggataaaacgttaaaaccgggtgacaaggctgtgatcgaggcatcccatatgaaaggcatgaagggcgccgaagccgttattgattcagccaaaaagacaaccgtttatatggtcgactatacaccgactgacggcggccaaaaagtaaccaatcataaatgggtgacagaagacgagctcgctgccgcaaaataaaaagaccgcaaaagccgaaggaactcctttggcttttttgcggtctcacatttatgcggattttcttttcaaagcgggtctcgttaaagagaatacagctaacgcgacagcgataatgacaatcaaaccgccgcaccaggctgttgctgtgactgaaccggtttgtccgatcacgccgccgccgatggctgacccgagcgcgatgccgatctgcaaagcggacgtgttgaagctttgctgaatatcggaagactcaggcgcaattttgattaaatagctttgctgcgccggcgcaaggctccagctgagcaatccccagatcaccatcgcaggcaggaaaatgattaaagaaaccgttgtcagcggaagaataaacaggatcagagcgaaagaaacggtcacaagcatgatgcttttaaatgctcctaaacggtcatacagccagcctccgaacgggccgccgcataccgctgacagaccgaacaaaaagtagcatacactgacccaaacggaactcaaatgaagcgttctttccaaaaaaggcgcaaagtaggcatagagtgtgtaatgccccgccaatgtaaacaaggtgacaagatgtgcgctggcaattttggcggtcccgatcgtcttgatctgctcacgaaacggaatcattttttcggcaggtattttttcaaaaaagacgctgataatcagcatggaaacgagagataatacgccgattcccaagaacagaacgcgccatccgaaggcattgctgatgataataccgacaggcacgcctaaagcgattgcggagctgaaccccatgaaaatgatgccgatcgcccgcgctctgtattcagacgccacgattttaggagcaatcgttaaagaaaggacgacaatcagccctgtgctcatggaagcgagaacccgtgacaccataagtacggcgaaattgggactgaaataagccaccagattacttaggaagaaaataaacagtgcgattaaataaagccgctttcgttcagcctttgccgtcactgccaaaagcagcgggccggataccgcgtaaccgagcgcaaacacgctgatcagctgccccgcgctgacgatggatatatctaagtcggaagcgatttgcggaagaataccgcccacaattaattcaaccaatccgactgcgatggtagatgctgcaagcagaaatactttgaaattcatgtacagatactcctttttttattttttagaaaataaaaaatcctgattacaaaaagtgtacgggacaatttttgtaatcaggattttacggttcctggtagacaccctcaaaccatatcattgaggttatacaatgtatgcaatattcggttgtgtccgtttctgcaaaaaattctaccataatagtgagggagattccatagaaaattcgaggaaatcctttcaatttcaatttcggcggctgtaacgtcattgatgaagcagggaaaaaaatttatgataaccgtaaggagtctatacagatcaaacattatacagccggaggaaaccgatgaataagtacgaaaaaatcgccaacgaaatgagaaagaggattaaaagcagtgtatatgacatagatcagccgatcccggatgaaaagacgctcgctgcggagttcgggtgcagccggatgacgatgaagcgggcgcttgatacacttgcggctgaaggaatgcttttcagaaaaagagggcacggcacgtttatcattcaatcagccatgcaggatgagcacgttcacgtagtcagcaacgaaattctcggcctgagcaatttgttaaaagacaaagatatcaagagcaaggtcatccggtttgaagtgcagtttccgtctcaagatgtcgccgcgcatttggccatcgatgaaaagactcccgtctattatgtagtgaggctcagaattgttgaaggcgaaccgtacgttcttgaaaaaacgtacatgccggcgagccttatacccggcattaatgacgaggtgctcaaccattccatctacgatcatattacgcgggaactccagctcaaaatcgcaggctcacacagaaaaatcagagcgtgcaagtcggatgatatggatcagcaatatctcggctgccggccggatgacccgatacttgaagtcgagcatgtaggctttttggacaacggcactccctttgaatattcattttcccgccaccgtcatgacaagtttgtcgtgacctcagtcaatataaaacgttcataaaagcgccgaagagtgagagaaaaactcactctttttttgttgccgctatttacatcttcgcttcttttatgttatattacccaatgatagaatcatcctacaaatttcagaggtgttttgatggagatatccaaaacaagcagactgtcgctcgtagaacaagtggtgacgcaaattgaatcgttaattcaatcggataaatggccggtcgggacgcgcattccccctgagctggatttaatgaagcaatttgatgtgagccgaaacacattgcgtgaggccattcgggcgctcgtacatgccggcctgcttcagacaaggcaggggagcggtacgtatgtcagctcatccagtgttctcggcgcggcattttaccgccatattaaaaaatcaaatttgcttgaaacattagaagtcagatacgcactcgaacgagaagctgcgcgattggcggcggaaaggcgtaatgacgaagacctgaaagcactgaaggcatgcttggatgaatgtgaagcggccttgcaaaatgaagatcgaaaacggtatgccgaggctgacattaaactgcacaaaaccattgtacaggcggcccataacaacatgctttctgatctttacgagcatatgacggaggcgctttgtgcgtcagtccataacctgttggaaatcacccctgctatacggatccacacccagcttgccgccgcgattattggacagaagccggatcaggccatggaggccgtcaaccaatacatcacagtatttaaagatacaatacacatggaggatgaacatgaaaattaaagacgaacatcaaattctgcaagcaagtcagcgtaaaaaactgatattgctggtcatcggagtcatattgataggggccaacctcagagcgcctctgacatcggtcgggccgctcgtttcctcaattcgggacagcctcggcatgaccaatgcggctgccggcaccattacgacagtgccgcttttggcctttgcatgtctgtcgccgtttgttcctttattgtcgcggcgcttcgggaccgagattgtgttactgtcatcattaattgtcctgacagccggaactctgctgcgctccatcgccggaatcggcactctctttttcggaacgattctgttgggattgtcgatcgccgtatgcaacgtcctgctgccgagtctcattaaacataagtttcctggaaatttaggcatcatgaccggcgtctactcggtttctatgaatctgtgcggcgcgattgcatccggcatcagcgtgccgatcgcctcttcagcggggttaggctggaaaggcgcgctcggctgctgggctatcctttctttcattgcgtttgtcatgtggattccgcaaatgcgaggacgcgaactgcctatccgcacgactgggacaaacggagagaagaaaagcagtctgctgcggtctccgctggcttggaaggtgacgatgttcatggggctgcaatcccttattttttacaccgtcatcgcttggctgccggaaattcttcagcagaatggtctcagctcaagtaaggcgggatggatgctttcattaatgcaattctcagtcctgccgattacttttatcgtgccgatcgctgccgctaaaatgaaaaatcagcgcgcactcgccggactgacagctttatttttccttatcggcattgccggcgttcttttcggaagcccggctctcactccgctatgggtcattttgatcggaattgcgggaggatgtgcgttcagcttggcgatgatgttcttcagcctgcggacacggcatgttcatgaagccgcggcgctttccggcatggctcagtcattcggatacctgcttgccgcgttcgggccgctcgtattcggtttgctgcatgacatcacgcacggctggacggttccgttattcatgctgatcgcagtctccgttctgatttttattttcggagtcggagcgggaaaagcagaacagatcaaaacagcataaaaaaacaaagggcccgtttagggtcctttgttttttatttgaaaagctgtctcaggccgtcacgctgtcagttttaagccgatgacaccgatgaggataagccccagagacaccaattgtgacaggttgaatttttctttaaaccaaagtatgcccacggctgaaacgccgatgcttcccatgccggtccaagcggcatacgcgacacctgtgggaagaacctgcatcgctccggaaaggcaaaagaatgaaagcataaagcctgttaccatgacaatcagcggccacttttttttaaaaccgtcaatatgtttcatggcaacggccgctacaacttcctccgctccggcaataaataacagcagccatgccattaatgttcaccccttgtttcagtttctttcgtaaataccttcattcctaaaattccggacaacagcaaagccaaaaagaatatttgcccgattgaaaacgattcgcctaaaatgacgcccgttacatatgtgccgacggtgcctattccgacaaaaacggtatatgcggcagccattggaatttttttataagagcggatcagcatcagaaagctgacggcaatcagaaggaaaataccaatccaatcaaagagcgaatccgcatgcttcagggcggacgcccaaactacttctaacagtccggctatcaatacaagcagccaatacatgatacagtcacctcagttatgaatgaatgtcagtcatttttacggcggtcaaaaatgatcggtctccgccaatcatttctgcaagcttcttttgagaaagctgaatatttcttttttatatacttcgagatcgacatcctgttcacagccgatataaaaccgttcagccgcgttctcgacaacgttgataatcgttctggccgtccatctgacatgaatgccgctgtggacctcaccctgttcaatggccgtattgatcacgccttccagccaggaataataaggctgataaatggcttcccatttctccattgaatgatcgatggcaagaccggaataacagagaacgataatatctttatgaagccgggtgatgtgaaatgtctcatctaccaaaatgtccagcaacgtccaaaaatcttcagaaccgtccgttttcccttttattctgtccagcgtagtgtcgagcaggttttctgcaatcgcggatatcagtgcgtttttagaagaaaaatataagtaaaacgtcccttgggccgttccggcttttttgacgatttctgaaatggatgctttgtctaatcctttttcagaaatgacttcaatcgcggcttgcaggatcttttcgtattttcccgagctttgttttgccaatagaggggttcctccttttatgaatgactgtcattcattttatcgcatgttctcttttttgtcatcccttaaaataaaaataccggaaagaagaccatacttctttccggtattcgtcatttatcactgtcgatcatagccttcggcagtcccgtatattttgcccagtaataaataccgagcgaaccgatggcgatcagaatcaggtcaagcggattgctgataatgcccaatccgtggccgaacgagccgagataggagaaaatcagcatcatgacataaaagccgacgatccaccatgctgatttcagctgctgccgtatgctgacatcatctttgggagcatatttactgaaacagagatagatcagaaacatgacaatttgagaaccgagaagccaggatacggtgcgccatccggaccaatatacaatataagaggtaaaaataaacgacagcggcccgatgatgctcatcccttttaaataaaacggtctgttaatattcttcgcgttgactctcagcgccgcagaagaaatcggcgcaatcgcataagacagaatcaatgcgacggagcatacgttgacaagagcgttccaagaagggaacggaagcgtccaaaaaacagccagaccgaacgaaagccaaagggaggcgcgcggtgtcccggtttctttattgactttagaaaaaatgctgaataatgttccgtttctggcccaggcatagacgagacgtgaagtcgtattcataaagatatttccgttaccgcccggtgataaaatcgcatctaaaatgaccaatgtcgccagccaccccaaacctagcaaaacggcgatatctttgaacggaagggagaattcagtcccgatagccggccatccgtgcttcagggtatccgccgggatcgccccgataaaagtgagctgcagcacggtgtaaataatagtagaaacgataatacagacaatcaatgcgatcggaatgttccgcttcggattctgcacttcactcgcgacagccacaatcggatgcagcccaagatatgcaaacatgacgccgcctgtggaaatcgcggcctgaattccggtgaaaccaaaaggcgagaatccgtgaacggtcatattgcccgggtgaaaatgaaaaatcagtaccacaattaccgtaatcggtacgacatatttaaaaatcgaaataatgaagtttgctttcgcaaaggttttgacactccagtaattgaggaggaagaacaggcagagcagcgcaaattgcaatatccacccggcaattgtcggagaatcggagccttttacggtcaaaccgggaaaccaatacgccacgtattggcggactgccgtgacttctatagaaataagactcgtgtatgccacaatggtgacaaaggaaattaaatatccgacgaggtgtccgtgtgaatatacgggataacggataattcccccggtccgcggcagcgcggcgcccagttccgcataaaccaagccgatcaataagatgattcccccgccgatcagccaggaaaaaacgcctgatgggcccgctttagaggcgacgttactgacggcaaacagccatgccgaaccgaatatggctcccatgccgattaaaataagatcaaaaagtgacatagttttctggaagtttccttgcttagacattcgctgcctccttagaaaagacattgttcctctttacataattcccattatcattcaaacatacccagccggccggctggaaaattaggacaactttcgaaacgaagtatgtacagcaatgtgctcacattataataacggccgtatggcaagatctcccggcttatattccccgttttaaacacattcaaacctcatattcagaaaaacaaaaaacgcccgaaacaggcgttttttgttacaagttcatatctttcagtccggggctgtgctcattcggaagctcaggaagttccggcacggggaaacctttaggaggctcggacacacttaattcgccgccgtttcggctcggcgtcgttccctgcagaatttctccgatccgtgtcggatccagtctgaaattaaattgagtattatgataacccatctcaacgaatttccggcattccgggtatttttcaatatcataattcggcacgggaaataatttgccccattcgacacccagtgtttccaacgcttttgtaaatgcattttgatgggcgttgtcacgaacaatcagaaaaccgagtgtttctctgaacgtctgatttgaactcatttcataaatgcgtgtcttttgcagcacgccggttgattccagcacgacattgtccaataaatcggaaatcagattcccgtggttgtatacccaagacccgttccatggattgccgccggcgtctacaggaagagaactttgcgctccgatgataaaatggtgcggattggcgtgtttaactgcttcgtcaagcggcgcctgatctgccgcctgatttccggcgccctcagcgccgctttcgtcgagcagcgcattgatcgtatgctggacaagctcaacgtgtgcgatctcttctaaaaatacaccgcgaagcaggtcacggaactgtttttcttttcctctgaaattagagctttggaaaaagtattgcatcatcgtccgcatttctccgtagtgcccgcctaaaatttcctgaagcaccttggccgcggccgggtccggcttgtccggtttaatgatattgatcagctcttctttgtaataatacataaacagcgccccctgaaagaagttttcggttcttctgttagtgtctttgcaaagtcagtttttatgtatcggcatcaaaaaaaggacggaaagcgtgtccgtccttttgtgttaagcctcaaccgctccgcgaagtttcgtgttgacaagcccgttccatccttgatccatcgtactgtgaatctcggagcttttccgattgactttattgatgacggcttccggctctttccatccgccgtgaatgagagtgaattccgtatctccgctttccgtttcctttaagacaaaagaaacgatccagccttccgtatcccacgaaaaagaaaggcggtacggcgcttcaatatccagcagcttgcacggagacggaccgaacggagattccagctgaaactcactgtcttcttgaggtgtgaaatcattcggcataaaccagagagacaggccgtccgcagtggagaccgtatcccagacaacttgtatcggcgccttgaaaacggcggtatgaataatgtccggtaatggctgattgctgctgttgttgtttttgttatctttgttttgtttatcagacatgaggcgtaaccactctttcgctgtttttacttttgatcatactacacggggcaggacatttgaaaacaaatcaaacttattttatgcttttccaaagccattcaattcattttaaggagacgtagtgatgacagatcaatttaaagcgttagtagtcgatcaacgtgaagaccggttttcagtcagcgtacggaagctggcggttcaggaccttcccgagggtgaagtgctgattaaggtttgctactcaggggtgaattataaagacagcttggctgccattcctgacggcaagatcgtaacgtcgtaccctttcgtcccgggaattgatttagcaggaatcgtcgtttcctcagatgacgcccgtttcaaagagggggataaagtcattgcgacaagctacggcataggtgtttcccgctttggcggttatagcgggatggcccgcattccggcagattggatcgtgccgctgcctgaaggtctgacacttaaagaagccatgacgatcggaaccgccggcttcactgccgcattgtccgtccagcgtcttgaagaaaaccatgccgctcctgaaaaagggaaggtgctggtgacaggagcgacaggcggcgtcggaagctttgccgtctccattctttcaaccttaggttacgaggtcgaggccagtacgggaaaagaagacgaaagcggctatttgaagagcctcggagcaaagacggtcattcaccgtgacgaagtgtataacggcacgttaaaaccaatgcaaaaacaaaaatgggcagcggccgtcgatccggtcggaggtgagccgcttgcttcagttctcagccagattcagtacggcggatcagttgctgtgagcggactgacagcgggaacgaaactcccggctacagtctttccgtttatattgcgcggcgtcagtctcttgggaatcgattccgtattctgtccgatggagacaagaaagaaaacatggcagcgtttagctgatgacttcaagcctgcagatctggaggcctttattcaaaaggaaattacacttgaagagctgccggatacgcttcctgctcttttaaaaggagaagcgagaggaagaacgatcgttacaataaacgaagaataaatcaaaaaccccccaatcagcagttgggggttttcaatatataatcaattatttattgagaagagattaactattgagtatatcgtgaaaatgagccgattaaaaacacaaattggttatatataggtaatataaaggtaagttataaaattttctgaaatatttattgactgaaagcgcttttaaaattatgataataacataaatgccaataatatcattataacttcactacaaagtaactataaaataacaatttgacgagaggggagagcggataatcactataaatgataacgctttcggattattttcttcttatataactgttttggacggtcagaacttgtatgcagacgttataggtgcaaatattgataactgaatattccgatattatctctatgtaaaaactaggaggatttgaagatgaataaaaatagcagccagcattcatttttgagaaccatcattttagtatcgacgttcgggggtctacttttcggctacgatacaggtgtaattaatggggcgctgccgtttatggcggaagctgaccagcttaatcttaccgctttgactgaagggatggtggcgagctccctgctcttgggggctgcgatcggagcagttttcggagggagattgtcggactataacggcagacgtaaaaatatccttatccttgccgttttgttctttgcagcgacgcttggatgtacactggcgcctaacgtatctgttatggtcatctcccgttttctgctggggcttgccgtcgggggagcatccgtaaccgttccggcgtatttggctgaaatgtcgccggcggaaagccgagggagaatggttactcaaaatgaattgatgattgtaacaggccagctgcttgccttcacgtgtaatgctatcatcggcaatgtgcttggtgatacctctcacgcctggcgttatatgctcgttatcgcggcccttccggcggtatttttgtttttcggtatgctgaaagttcctgaaagtccgcgctggctggtttctaaaggaagaaaagaagatgctctgcacgttctccggcgaataaggaatgaagagaaagcgaagtctgagctcgctgaaattgaatctgcctttcataaggaagctgagatggagcgggcgacctttaaggatcttgccgttccatgggtgcgccgcattgtgtttatcgggatcggaattgcggtagtgcagcagctcaccggcgtgaattcaattatgtattatggaactcaaattttaaaagatgccggtttcgagacaaaagccgcattaatcggcaatatcgctaacggtgtaatttcggtgctcgcgacttttgtgggaatatggcttctcggcaaagtcggccgccgcccgatgctgatgacggggctgatcggaacgactgcggtgctgcttttgatcggagttctgtctgttgtgctgaaaggatcgcccgctcttccttatgtggttctttcattaacagtcactttccttgcgtttcagcagggggctgtctctccggtgacctggctgatgctgtcggagatattcccgcttcgattgcggggacttggtatgggggtcactgtcttctgcctctggatcgtgaacttccttgtgggtttcacttttccggtcctgctcgcaaacatcggattgtctgcaaccttcttcatttttgtcttgttagggatagcgtccgttatatttgtgaaaaggttccttccggaaacgaaaggtctgtcgctcgaacagcttgaacaaaacttccgtgcttatgaaaaaacagatcgtaatagcgcggaagccaaggtgagcgggtaatctgaatagacgcggggttcctaggaatcctgcttttttatttattatatagaagggaataacaagtgagaaaaaagtttcgtaaaagtgttgacctaatttaaagtgcgtggtatattattaaacgtcgctgatgaacaaagcgaaaacgacaaatgagaaaatgatcttttaaaaaaagactttacaaattctcaaaagcgtgtataatgaatgaggtcgagaaaaagacttcgaaaagaaataaaaaaacacttgacatcataactgattggtagtatgatagttaagtcgcctgataagcgcctgtagctcaattggatagagcgtttgactacggatcaaaaggttaggggttcgactcctctcgggcgcgccaattcaaacgcgggtgtagtttagtggtaaaacctcagccttccaagctgatgtcgtgagttcgattctcatcacccgctccattataatgatctttgaaaactaaacaagacaaaacgtacctgttaattcaaagttttaaataaatcgcacagcgatgtgcgtagtcagtcaaactactttatcggagagtttgatcctggctcaggacgaacgctggcggcgtgcctaatacatgcaagtcgagcggacagatgggagcttgctccctgatgttagcggcggacgggtgagtaacacgtgggtaacctgcctgtaagactgggataactccgggaaaccggggctaataccggatggttgtctgaaccgcatggttcagacataaaaggtggcttcggctaccacttacagatggacccgcggcgcattagctagttggtgaggtaacggctcaccaaggcgacgatgcgtagccgacctgagagggtgatcggccacactgggactgagacacggcccagactcctacgggaggcagcagtagggaatcttccgcaatggacgaaagtctgacggagcaacgccgcgtgagtgatgaaggttttcggatcgtaaagctctgttgttagggaagaacaagtgccgttcaaatagggcggcaccttgacggtacctaaccagaaagccacggctaactacgtgccagcagccgcggtaatacgtaggtggcaagcgttgtccggaattattgggcgtaaagggctcgcaggcggtttcttaagtctgatgtgaaagcccccggctcaaccggggagggtcattggaaactggggaacttgagtgcagaagaggagagtggaattccacgtgtagcggtgaaatgcgtagagatgtggaggaacaccagtggcgaaggcgactctctggtctgtaactgacgctgaggagcgaaagcgtggggagcgaacaggattagataccctggtagtccacgccgtaaacgatgagtgctaagtgttagggggtttccgccccttagtgctgcagctaacgcattaagcactccgcctggggagtacggtcgcaagactgaaactcaaaggaattgacgggggcccgcacaagcggtggagcatgtggtttaattcgaagcaacgcgaagaaccttaccaggtcttgacatcctctgacaatcctagagataggacgtccccttcgggggcagagtgacaggtggtgcatggttgtcgtcagctcgtgtcgtgagatgttgggttaagtcccgcaacgagcgcaacccttgatcttagttgccagcattcagttgggcactctaaggtgactgccggtgacaaaccggaggaaggtggggatgacgtcaaatcatcatgccccttatgacctgggctacacacgtgctacaatggacagaacaaagggcagcgaaaccgcgaggttaagccaatcccacaaatctgttctcagttcggatcgcagtctgcaactcgactgcgtgaagctggaatcgctagtaatcgcggatcagcatgccgcggtgaatacgttcccgggccttgtacacaccgcccgtcacaccacgagagtttgtaacacccgaagtcggtgaggtaacctttatggagccagccgccgaaggtgggacagatgattggggtgaagtcgtaacaaggtagccgtatcggaaggtgcggctggatcacctcctttctaaggattttaacggaatataagaccttgggtcttataaacagaacgttccctgtcttgtttagttttgaaggatcattcgattcttcgagatgttgttctttgaaaactagataacagaagtaattcacattcaattagtaatgcaagatatcacgtagtgattctttttaacggttaagttagaaagggcgcacggtggatgccttggcactaggagccgatgaaggacgggacgaacaccgatatgcttcggggagctgtaagcaagctttgatccggagatttccgaatggggaaacccaccactcgtaatggagtggtatccatatctgaatacataggatatgagaaggcagacccggggaactgaaacatctaagtacccggaggaagagaaagcaaatgcgattccctgagtagcggcgagcgaaacgggaccagcccaaaccaagaggcttgcctcttggggttgtaggacactctgtacggagttacaaaggaacgaggtagatgaagaggtctggaaaggcccgccataggaggtaacagccctgtagtcaaaacttcgttctctcctgagtggatcctgagtacggcggaacacgtgaaattccgtcggaatccgggaggaccatctcccaaggctaaatactccctagtgaccgatagtgaaccagtaccgtgagggaaaggtgaaaagcaccccggaaggggagtgaaagagatcctgaaaccgtgtgcctacaagtagtcagagcccgttaacgggtgatggcgtgccttttgtagaatgaaccggcgagttacgatcccgtgcaaggttaagcagaagatgcggagccgcagcgaaagcgagtctgaatagggcgaattgagtacgtggtcgtagacccgaaaccaggtgatctacccatgtccagggtgaagttcaggtaacactgaatggaggcccgaacccacgcacgttgaaaagtgcggggatgaggtgtgggtaggggtgaaatgccaatcgaacctggagatagctggttctctccgaaatagctttagggctagcctcaaggtaagagtctcggaggtagagcactgattggactaggggcccctaccgggttaccgaattcagtcaaactccgaatgccgatgacttatccttgggagtcagactgcgagtgataagatccgtagtcgaaagggaaacagcccagaccgccagctaaggtcccaaagtatacgttaagtggaaaaggatgtggagttgcttagacaaccaggatgttggcttagaagcagccaccatttaaagagtgcgtaatagctcactggtcgagtgactctgcgccgaaaatgtaccggggctaaacgtatcaccgaagctgcggactgttcttcgaacagtggtaggagagcgttctaagggctgtgaagcaagaccggaaggacttgtggagcgcttagaagtgagaatgccggtatgagtagcgaaagaggggtgagaatcccctccaccgaatgcctaaggtttcctgaggaaggctcgtccgctcagggttagtcgggacctaagccgaggccgaaaggcgtaggcgatggataacaggttgatattcctgtaccacctcctcaccatttgagcaatggggggacgcaggaggatagggtaagcgcggtattggatatccgcgtccaagcagttaggctgggaaataggcaaatccgtttcccgtgaaggctgagctgtgatggcgagcgaattatagtagcgaagttcctgattccacactgccaagaaaagcctctagcgaggtgagaggtgcccgtaccgcaaaccgacacaggtaggcgaggagagaatcctaaggtgatcgagagaactctcgttaaggaactcggcaaaatgaccccgtaacttcgggagaaggggtgctctgttagggtgcaagcccgagagagccgcagtgaataggcccaggcgactgtttagcaaaaacacaggtctctgcgaagccgtaaggcgaagtataggggctgacgcctgcccggtgctggaaggttaagaggagcgcttagcgtaagcgaaggtgcgaattgaagccccagtaaacggcggccgtaactataacggtcctaaggtagcgaaattccttgtcgggtaagttccgacccgcacgaaaggcgcaacgatctgggcactgtctcaacgagagactcggtgaaattatagtacctgtgaagatgcaggttacccgcgacaggacggaaagaccccgtggagctttactgcagcctgatattgaatgttggtacagcttgtacaggataggtaggagccttggaaaccggagcgccagcttcggtggaggcatcggtgggatactaccctggctgtattgaccttctaacccgccgcccttatcgggcggggagacagtgtcaggtgggcagtttgactggggcggtcgcctcctaaaaggtaacggaggcgcccaaaggttccctcagaatggttggaaatcattcgcagagtgtaaaggcacaagggagcttgactgcgagacctacaagtcgagcagggacgaaagtcgggcttagtgatccggtggttccgcatggaagggccatcgctcaacggataaaagctaccccggggataacaggcttatctcccccaagagtccacatcgacggggaggtttggcacctcgatgtcggctcatcgcatcctggggctgtagtcggtcccaagggttgggctgttcgcccattaaagcggtacgcgagctgggttcagaacgtcgtgagacagttcggtccctatccgtcgcgggcgcaggaaatttgagaggagctgtccttagtacgagaggaccgggatggacgcaccgctggtgtaccagttgttctgccaagggcatcgctgggtagctatgtgcggacgggataagtgctgaaagcatctaagcatgaagcccccctcaagatgagatttcccattccgcaaggaagtaagatccctgaaagatgatcaggttgataggtctgaggtggaagtgtggcgacacatggagctgacagatactaatcgatcgaggacttaaccaatttgaatgtatgcttactgttatctagttttgagagaacactctcaatggtttggtggcgatagcgaagaggtcacacccgttcccatgccgaacacggaagttaagctcttcagcgccgatggtagtcgggggtttccccctgtgagagtaggacgccgccaagcttttctaaaattttatcatcgcggggtggagcagttcggtagctcgtcgggctcataacccgaaggtcgcaggttcaaatcctgcccccgcaaccaaaaaataaatggtccggtagttcagttggttagaatgcctgcctgtcacgcaggaggtcgcgggttcgagtcccgtccggaccgccatttttattgtaaacgaaacgatcatgttttcgttttttttgtgttttcttttaaatgctggcagcttggtatctaaccaagctttcttttatatcgttaaagtcttggatattgaaacataatccgatacactagaaagagctgtatttcacaagagcgtcagaaagggagacgggagatatatggatgagtttgatttgattcacagtattacgccgcattcgcattatcatccttccgtcgatgtagggatcggtgatgatggtgcggtttatacagcatcaccccatatgcagcaaattgtctgccttgatacaatggtggagaatgtccattttaaattagagtattcctctcctcatgatatcggttataaggcgcttgctgttaacattagtgacgtggcggcgatgggaggcattccgaagttttatttggtgtctctagcggttccttcttgctggcagaaagctgacgtccaggcaatgtatgaaggaatggcggaactggcgaaactatatcaaatggatttgatcgggggagataccgtctccgcttccggtcaagccgtaattaccgttactgtcatcggagaagttgagaaggattgcgcttgtctgcgaagctcggcaagacccggagatgttgtgtttgttacaggggatatcggttcgtccgcagcaggactgtctcttttattgggagaaacactcccttctgcttttcatacgactgattattttatccaaaaacataaacggcccgttccgagagttcaggtcggccgcttctgctctcagcttcagcgcgcggctctgaatgatatcagtgacggattggccagtgagctgcatgaaatagctgaggcaagttcagttacgatagaaattaaagaacaacttctgccggtgcatccggatttgcctgaggcagattctgagtggaagaaatgggtgttattcggcggtgaagattttgaattggttggaacggtttctcagcaagagtggacctctctgcttgattactgcactcaatcgggcattccgattgcgaagataggagcggtatctgaacggaaggaagcatgtgttcttttgacagccaatgatcagagacaaatcgtccttgagaaaaaaggatacaatcattttaaataagacgggtgactcactttgaagacattacaatggagaacgaaaaaccccgaagaaacgaaagccgtagccaagcttgccgcttctttggcaaagccgggagacattttgacactggaaggcgacttaggcgcgggaaaaacgacttttacaaagggttttgccgaaggactgggaatcacgaaagtggtaaacagcccgacttttacaattataaaagaataccatgacggttcgcttcctctatatcatatggatgtgtatcgtatggaggatgaaagcgaagacttagggcttgaagaatattttgagggacaaggcgtctgtttaattgaatgggctcatttaattcaggatcagctgcctgctgaacggctgcagatcgtcatcacaagagccggtgatgaggcaagggacattacctttacggcttgcggaacacggtatgaaacgctttgtgaggagataaataaacatgacaatactggcaattgatacgtcaaattacacactgggtgccgcgctcgttcgtgacaaaacggtgatggcggagtatattacatacttaaaaaagaatcattccgtgcgggccatgcctgctgtcaattcattgctgaaggattgcggcctaacaccgcaggaccttacgaaaatagcggtggcgaaaggaccgggttcgtacacaggtgtcagaatcggtgtgacgctggcaaaaacattggcatggtcgctgaagcttccggtttccgctgtctcgagtctggaggtgctggcggctaacggacggcactttcaaggactgatctgcccgttatttgatgcccggcgcggacaggtatatacgggactttatgaatatcaggacggccgattacaatccgttcttccagatcagaatgtccttttgactgattggctcggcatgctgaaagaaaaagcgtctccggttttatttttaggacacgatacagccattcatgaagaaaccattctgcatgaattgacatctcaagcagtgattggaacggctgcacagcataatccgcggccgtcagagctggcgtttttaggcttggaaaaagaggaagcggatgtccacagccttgttccggattatttgcgtctggcagaggctgaagcgaaatggatggaatctcaaaaatagggtgatagggatgaaaacgaaaacggcgattcgaagcatgcgtccggaagatattgatcaaatttatgaaattgaaacagcatcctttacttctccgtggacgaaggattcattttatcatgagcttttggaaaatccgtatgcccactaccttgtcattgaaaaggacggctgtctggcggggtattgcggaatctggattattatagatgacgcgcagattacgaacatagccattaagccggaatatcggggccaatcattgggagaagcgctgtttcgctctgcgatagaattgtgcagagaaaaaaaggcaagaaggctctctctcgaagtcagggtctcaaatcatcccgcccaatccttatataaaaaattcggtcttcaggccggtggaatcagaaaacaatactatacagataacggggaagatgcgttattaatgtgggtgacattacatgagtgaaaaacaagatatttatgtactaggaatcgaaacaagctgtgatgaaacagcggcctcagtcgtaaaaaacgggaatgaaattatttcaaacgttgtcgcttctcaaattgaaagccataaacgtttcggcggggtcgtgcctgaaatagcgtccagacatcatgtggagcagattacccttgtgattgaggaagctctttcaaaagcggagatgggctttgatgatcttgatgcgattgccgtaacggaaggacccggacttgtcggagccctgttaatcggagtcaatgcggcaaaggcgttaagctttgcccatcaaataccgctagtcggcgttcatcacattgcgggtcatatttatgcaaacaggctgataggagagcttcaattcccggcgcttgctttggttgtgtcaggcggacatacggaattggtttatatgaaagagcacggttcattcgaggttatcggtgaaacgctggatgatgccgcaggcgaagcttacgacaaagtggcaagaacgatggggcttccttatccgggagggccgcagattgataagctggctgctgtgggaacggattccattccgcttccgcgtgcgtggctggaagaagggtcttacaatttcagcttcagcggcctgaagtcagccgtgattaacacacttcataacgcctcgcaaaaaaatgaggtgattcctccggaggatcttgcagcaagctttcagcagagtgtcattgatgtactgacggcaaaaacctctaaagccgcgaaagaatacggggttaaacaagtgctgctggcagggggcgtagccgctaacaaagggctgagagccgcactgcagcaggaattcagccattcgggagatcccgagcttatcatcccgccgctttctttatgcacggacaatgcagcgatgattgcggctgccggaaccgttgcttttgaaaagggaattcggggctcatatgatatgaacggacagcccggtttggaattaacatcctttgatcgtctcacgttgtaaaacgtgaggctttttttacttattaacagataattctaacatatccacaggattgtgaatatattcagaaatccaggctggataagggactataagttgttagtaaagtggataaagtcagaaaattttgtggatagtgtgcataaaacgcttacttatatggctgacaaggaggatagctgtggataaaaaagcaccccttaaagaggtgcttgactttttctattcttctgaggagagttcctcccattctgctaataagttttcgagctcttgattcagagattcattctccgcgtgaatggtctgtaccttttcatgatcctgatacacgtcaggggcgcacagcagctcctcattggcgctgattttctcttcggcggatgagacggctgcttcgatttcttcaatgcgtctcaggcgctgccgttctttcttcttccattctttttcttcctcgtaagttcttttcgtatcctgtttgaccttgccggcaggctgagcctgctccttttcctgccgcttcatttcttccagttccagctgctgtgcttttttctcggtgtaatagtcatagtctcccaaatattcttctgcatgatcaggtgacagctccagcactcttgtggcgatcctgttaataaagtagcggtcatgcgatacaaataacagtgttcccgggtagtcgatcagggcgttttccagcacctctttactgtccaggtcaaggtggtttgtcggttcatcaaggatgagaaagtttgctttttgaagcatcagcttggcaagcgcgactcttgctttctccccgccgcttaacgagcggaccggtttcaggacatcgtctccgctgaacaggaagttgccgaggcatgttctgatctctttttccggcatgtccggatattcatcccacagctcgtccagcacgcgtttggacgaggtcagttcagcctgctcctgatcataatagccgattgtgacattggaaccgtacgtgatcgatccggattcggggctgagcgtgttcataatggttttcagcaaggttgatttgccgattccgttcggtccgacgagggcggcgctttcgcctcttgtaatgccgaaggtcaggtttttcaagagcggcggctggccgtcatagctgatggaaacatcctgtacgcgcaggacgtcgtttccgctctgttttgtaatgtcaaaacggaaggcggctgatttttcatccccgagcggctttgccatgacgtccatccgttcaagctgttttcgtctgctttgagctcttttcgttgtagaagctctggccagattgcggtcgacaaaatcttgaagcttggcgatttcgtcctgctgtttttcatacagcttcaggtctttctcatactgctcagctttttgttctaaataggcgctgtagttgccgagatattttttactttctgtccgtgagacctcatacacttgactgacgactttatcaagaaagtatctgtcgtgggagacgatcagaatggcgcctgaatatccctgtaaataatgctcaagccatgtaagcgtatcgatgtcgagatggttcgtcggttcatccagaataagcagatcaggctgggtcagcagcagttttccgagcgcaagccttgttttctggccgccgctcaggctttgcactttcacggaatcgtcaaattttccgaagccgagtccgtgaaggatagatcggacgtccgcttcatattgatagccgcctttatccttgaaatcctgctgaagcctgtcataggttttcatcagcgtctcaagctccgcgggggcggccgtggccatcttttcttcaatagagcgcatttctttttccattgctttcaggaaatcaaaaacactcagcagttcttcttttatggtaagctgggattccaagcctgtgtgctgggcaagatatcccatcgttaattctttcggtttgattaattcacccttttcatatgaaaggtgacctgcgataattttaaggagagttgatttgccggctccgtttctgcctactatggcgatgcgatcccgagatctgacttcaagctttatattgtttaaaataggatcagcgccaaaagatttggatagctgattaatttgtaagatcatcatattatttcacctctgttataataagttaagtgtagcttatcaacctgctgtcagcaaacaatacatcagaattggaacattataggataagacatcagggagaaaatagtgtatgatcagaagtaaggagagtttaaatatgaatggattttctcattttaatgaagaaggccgtgcccgcatggtggatataagcgataaatcttcaacagtccgtactgccgctgcgatatccagcgtacacatgaagcatgacgtgtacagcagaatcaaaaaccgcgagatcggaaaaggagacgtgctggctgtcgcacaggtggcaggaattatggccgcaaagcagacgtcagcgattatcccgatgtgccacccgctttctttaagcagcgtcgacatttcattcggctgggaggaaaaggattccgaagccgttcttcatatacaggcaagcgtaaaaacgaaagggagtacaggtgtggaaatggaagcgctaacttccgcttcagtctgcgctttgaccgtttatgacatgtgcaaggcgctggataaaggaatggtcatcggcccgacctgcctcatggaaaaaacaggaggcaaaaacggtgattttaaaagagatgcatctgagtataaagtggaggaccaatcatgaacaaggatcaatcaaaaattccacaggcgacggcaaaacggctgccgctttattatcgctttttaaagaatttacacgcgtcaggaaaacagcgcgtttcatcagctgaactgagcgacgcggtaaaagtcgattcggccacgatccgccgggatttttcctatttcggggcgctcggcaaaaaaggatacggctataatgtggattacctgctgtcatttttcagaaaaacactggatcaggatgaaacgacgaacgtcattttgatcggtgtcgggaatttagggacggcgtttcttcactataatttcacaaaaaataataacacaaaaatatctatggcttttgatgtgaatcagagtaaaataggaactgaggtaggcggtgtgcctgtctttgatcttaatgatttagagcttcacattaaggatgaacccgtggcgattcttaccgttccggcggttgccgcccagtcaatcaccgaccggctcgtgtcgctcggaatcaagggaatccttaactttacgccggcccgtttgaatgtgccggatcacattcgaattcatcatatagatttagctgtagagcttcaatcattggtttatttcttgaagcattattctgttttggaagaaattgaatagcgaaaggaggagctgcacatgatcggtcctggaagcctggcggttatcggtgtggtggcggtgattattttcggtccgaagaagcttcccgaattaggaaaagcggcgggggacacgcttcgtgaatttaagaacgctactaagggattagccggtgaagaagaggaaaaaaagaaagaagaacagtaagataggatgacgcgtatgagagtgaatcaaatgacgcttgtggagcatattgccgaacttcggaaacgattgctgattgtggcgttatcctttacggttttctttattgccggcttttttctggcaaaacctatcattgtgtatcttcaaaaagccgatgaagtaaaagagctcacccttaatgcttttaacctgacggatccgctgtttatctttttgcagttcgcgtttatcatcggcatcattttgacttcgccgattattctctatcagatttgggcgtttgtcagcccgggcctgtatgagaaggagcgcaaagtaacactcagctatattccgatttcgatcgtgctgtttgtcggcggtgtgtcgttttcttattatattttatttccgctggtcgttgattttatgaagcgggtctcgaatgacctcgatgtcaaccaggtgatcgggatcaccgagtactttcattttctgctgcagctgacgattccgttcggactgctgtttcagatgccggtgctgatcatgtttttaacgagactcggtgttatcacgccgatgtttttatcgaagatcaggaagtacgcgtattttgtgctgcttgtgatcgccgcgatgattgcgccgcctgagctgctgtctcacttgatgattaccattccgctttgcattttatatgagatcagcattcttatctcaaaagcggcgtatcggaaaaggcagaccagcagtgaatccgatcaggacgtatcagcataaaaaaagccatttctcaatgatgagaaatggcttttcttttatttttgatttttcttcactttaaatgagaaagcgaacattttaaacgagatgctgatattataagcggcgaaaaccatcagcagtatggaataaaaagaccacatgcttcccggagagcttgcggccaaatacgtaaagatacagccgactgcgaaataaatcaagccccaagtcattgggttcctcatacaaacaatcctccaataattaattgcatttgctcactatgctgttcaatatatttttgggcggggccgagctgcatgaccacgacaatggtattcatcatgacatgggcgaatatcggcacaataatccgtttcgtctgcacatacaagaacgcaaaggtaaagcccatggccgtatacagcagcaggtgcgtgaggtcttgatgcacaatgccgaaaatgacggaactgatcagtccggcgataaagaaattcgttttttcatataatacaccgaaaatgatcttccggaaaatgatttcttcaagaatcggcccgacgatagaagaaacgataatcatgagcggcatggctttaataatgttaagaatggctttcgtgttttcggaaccgctgcccacatgaaagacatactgctcaatcatcccggcgattccctgagaaaataaagcgagccatattcccgcgaccgcccagagaatggacatgccggcggatgctttcttcccgtttcttaatgtctgcttcggcgcggttctcaaaatcaagagaacgataatcaggcagataaaaaagcttacgacggaataaatcccctgagccatggtgaggttcgcattcgtagggtgtccgcccgcatagccgaatttgtacattaaaggaatgccgatcaatgcggaaagctgcatgataacatatgtcaaaatgatataccaatactgttttctcaaatgatatgtactcctttatcctataaaatcaacttatttgttcttattgtaacacaagtgaacttgacgtgaaaaaaggagaaaatcagtgtgagagagaatcatgtaagcgtgaaaattttttattcttatgacttgaaattggaagtgagattctttattataataactgtgttagcactctttagagctgagtgctaaaattacatattcatactattgaggaggttattacattgttaaagccattaggtgatcgcgttgtcattgaactcgtagaatctgaagaaaaaactgccagcggaatcgtattaccggattctgcaaaagaaaagccgcaagaaggcaaaatcgtggcagccggttcaggtcgcgtgttggaaagcggagagcgcgttgctttagaagtaaaagagggcgaccgcattatcttctcaaaatacgccggtactgaagtgaaatacgaaggtactgaatacttaatcttacgtgaaagcgacattttagctgtaatcggctaagcaaataaatatttttaaaaattcgaggaggtttcgttaacatggcaaaagatattaagtttagtgaagaagcacgccgcgctatgcttcgcggtgtcgatgcgcttgctgacgctgtaaaagtaactttagggccaaaaggacgcaacgtggttctggagaaaaaattcggttctccgttaattacaaatgacggtgtgacaatcgcaaaagaaattgaacttgaagatgcgtttgaaaacatgggtgcgaagcttgtagctgaagtagccagcaaaacaaacgacgttgccggtgacggtacgacgactgcgactgtacttgcgcaggctatgatccgcgaaggccttaaaaacgtaactgcgggggctaaccctgtcggcgtgcgtaaaggtatggaacaagccgtgactgtagcaatcgaaaacttaaaagaaatttctaagccgatcgaaggcaaagagtctatcgctcaggttgctgcgatctctgctgctgatgaggaagtcggaagccttatcgctgaagcaatggagcgcgtaggaaacgacggcgtcatcacaatcgaagagtctaaaggattcacaactgagcttgaagttgttgaaggtatgcaattcgaccgcggatatgcgtctccttacatggtgactgactctgataagatggaagcggttcttgacaatccttacatcttaatcacagacaaaaaaatcacaaacattcaagaaatccttcctgtgcttgagcaagttgtacagcaaggcaaaccattgcttctgatcgctgaagatgttgaaggtgaagctcttgctacactcgttgtcaacaaacttcgcggcacattcaacgctgttgccgttaaagctcctggcttcggtgaccgccgtaaagcaatgcttgaagacatctctgttcttacaggcggagaagtaatcacagaagacttaggccttgacctgaaatctactgaaatcggacaattgggacgcgcttctaaagttgtggtaacgaaagaaaacacaacaatcgtagaaggcgccggcgacactgaaaaaatcgctgcacgcgtcaaccaaatccgcgctcaagtggaagaaacaacttctgaattcgacagagaaaaattacaagagcgtcttgcgaaacttgccggcggcgtagctgtcatcaaagtcggcgctgcgactgaaactgagctgaaagagcgcaaacttcgcatcgaagacgcactcaactcaactcgcgcagctgttgaagaaggcatcgtatccggcggcggtacagcgctagtcaacgtatacaacaaagtcgctgcagtggaagctgaaggcgatgcgcaaacaggtatcaacatcgtgcttcgcgcgcttgaagagccgatccgtcaaatcgcacacaatgcaggtcttgaaggatctgtcatcgttgagcgcctgaaaaacgaaaaaatcggcgtaggtttcaacgctgcaactggcgaatgggtaaacatgatcgaaaaaggaatcgttgacccgacaaaagtcacacgttcagccctgcaaaacgcagcttctgtagcagcaatgctcttaacaactgaagcggttgtcgctgacaaaccggaagaaaatgccggcggcgcaggaatgcctgacatgggcggcatgggcggtatgggtggcatgatgtaattaaacggcgaaaacccttgatataacaagggtttgaccgtttttcatcaccccaatcagccgaaaaaatagcaaaaagataacattcattgaggatgcttccaaaagtctgctgggactttgtgtgaggcatcctctttcataattcaaatttaatatatcgggaacttttgttttttattggctaaaaaagaaaggccctgttaagggcctttctttaagctgctgttgttgtcgttttatcttttctgacaagtcccatgatacctggaataataagaagaacagcaggcagtaaatagaacattgatatacaaattactccgccaattcctgagataagaagcaatactcctccgactttaggtttcttcttaactactaccgaagcgacaatacccaaaattgataagacaacagctccccagcctaaaccaatgatttcgcttgtaccgcttgaattaaaagaggcatcaagtccaccaataatcaatgccatgatcgctccaataaaaccaaaaattccacccaataatcctaaaacaaattcagttgttcttttcattattaaactctcccttacttaactggtactgtaattgatacagctttatttttcatgaagtctatgtgacaacatatccaaggttcaatttaatttcttttgactttatcaacatcatttttttcatctaaatagagaattcaaatacgcctttttgttttattccgccttggacttctccatcagttaagaacatgtttgcagctaattgccaataacggcatttccttggtcaggataaaaggtcaggtttttgtcagttgtatttttgatgtatattccgacgtttaccttgtctctcatgatctttatatcgcccagcttaactcatgcccagtgcttcagcatattgtttgcttgtatcgacttttttagaacagtcatcttagtctctcaagcttttttattttttgaatcactatccctgtgagacatcatttgtcgagctactacaagccgctaaaaactaaggatagtactaaagacatgaataaaaagagttgctttttcacctaaaacccccagtttatataatataatacctatatataatcggctataatcaattaaatttcaaggggatattaccactttttctaaaaaattcttagcggaagaaattaagctataaaatatcacttgaaatatcaaagttggaaatcattcaacttactgctagctttaaacattaaagaccacatacagtttgacatcctattaagttttagtgtagccctagtactggttttatcattttgacggatttgttatcccatcactgctaaacattgattcaaaaatatttattaaaaactaatttttcatgatgttaggaggaataatgccaataaacagcaaaaacccttgttatatcaagggttggatatttgatttccatctaaattgctcatgcattctagcaaaaaagaccttatcagttgagtaaactgataaggccttatttataaataaggtgtgagggagttatctaagacggaactcacactttcctaactacaatgtgacttcatcatttccttcaagcaccattctcagctgctccacctcaccccgaatcccaatcccaggctcccacgaatcaatcaaacgcatcgccttctgattcgattccatcgctttcttattttctcctttacgatacaacagctgtgccattccgtaatagtaatagatcaactcaacttgattggcgttgtgtttgtcatagagcatttgttcaaaggctttttccgctttttcgagctgatcacacttcacgtaagccatgccgaggttgaaataggcttctatcgttttttcgccgccgtatgcggcgctggttttgtttgccgcttcgtataatgtgatggcttcttcgtagtgagagcgggcgaaactcaggtcgccgcggaccagaagaaccctgtgccggataatgggtgagacgggctgatctttgatgccgtccagcattgctgccgctttgtccggttctccgatttttaacagcagcctcgattgcagggcggttccccatactttcaagtcgtcgtgatccggtgcgcctgattgttcgagtatcttcaggccggcttctatttgcctgagagctccgtctgaatcgttgacttccatcagcgcccagcctgccgtgtcgatccgaaagtaagcttcccgcgtgtgttcgcctgattgacgggcggcatcggcggcttttaatccgtattcgattcgcaggggcaggttgattctgcttagaaaatggctgatgcggatgatgagtttgatcaggatgtcatgttgtccggtttcgaccgaccattcgatgacctttaggatgttcggccattcctttttcatttgctctaaattccgtcccaacagatagctccaatagacagaattgggccgttcccgttttaaatgggtttccgcataatcaatataataatgcgcccagcggctgcgggcttcttttgcaaattcgtgattttcggataagtgctgttctccgtaagcgacaacggtttgatgggctgcgtattgaattcttccttcgcctcgttccggctgtattaaagcatatgaccgcatttgctcaatcgcgtaatgaaaccgccggacgtctaatccggctgcttgagccaagcttttctcatcagggggcttagcgaaaaagcaaagcgtctgccatagttttcgtgtgtcttcatgacatctgtcccatgtgcggccaaagagaacctcaaacaattccaataatgagtagcctgcttgtttaagttcttgaatgagctgcggagcggggatgtcgtcgtctgacatgtaagcgatgctcagtgccatggccttcgggttgccggcggctgccgagatgaattcattcttaaggtcaggcgatagctgcagcagctgctccagcttttcccgtttttgcgggaggttgcatgtttgcagacagcggtgcacttcttgatggaaaaattcaagggcatccgtttgttcaaggccgctcagctggatggccgccagttccccgaggccgtcccggtatgtctgttttacgttttcccgtgccgtaaggaggacttttacgccttgcggaaggccgatgataaattcgtgaatgtcacgttccgctgtatcgatgctgtcaacgatcagcaataccggttttttatttgaatgagcggctaatgcattgcggacgacgaaccgtttttcgttgattgatttatcgatttgttcggtgcgtccgagctgataggcgatcgtgtttaaaaaatcgctgaagctcaatcctttccagtcagcgctgatccagatgatgctgttgaatgccggccaatctggtgaaccgccggcacaaaggtaggctgcttcaagagcgattgttgtttttcccatgccggcccagccggtgagtaaacagaccggtgacggagacagcatccattgccggatcgcctctatatcaaagtcgcggccgataaagtttcccgtccggcgtgacggtaagttatgcgtgacggagtttcttgtaagcgcattcgtttcgtggcttggtctgtcatgaaacagccgctttactgctttttcaacatcgtcatcactcggcgctccgaatgatccgtctttccggagtatttttgctttttttagacaagacgccgtccaaacgggcaatgcgggtttgatgacgggaatggtggtggtttccagaagatcggtcagccattcagaatccatatcagtcttttctataatgatccagatcatgccgaacagctttccgtcgtcaattcgtccgggaatgtagtttgcgcccatctgtccgatccagcttttgatcgtgttagaggaaacgcctaatcggagtgcgatttgatctatataagactgtcctgctttttcgttctttttccttctgactttataatcaggatgaagtttcagcgatttgacggcaggtgccagcagttctgcaaaatgtgtccggttttcaagttcagccattagcctgcacctcctattagtactattttatcaattcagtgttttttgtatatgaaaaaataaaaagtacagtgcggctgtccttttatacagcaggaaaggctgttgaatgtatggaaaagcagataaaataggggcagtaacagagaaaacaaaaatgtatgcacttacatttcaaagcagagaaaggattttgccaaatgactcacacagtgcctcaaaacatgaaagcggcggttatgcacaacacgagagaaatcaaaatcgaaacattgcccgtgcctgaaatcaatcatgatgaagtgttgattaaggtgatggctgtcggaatttgcggatctgatctgcattactatacaaatggcagaataggcaattatgtagtggaaaaaccatttatcctcggtcatgaatgtgcgggagaaattgccgccgtcggatcgtctgtcgatcaattcaaggtgggagaccgtgtcgccgtcgaacccggtgtcacatgcggacgctgtgaggcgtgtaaggaggggcgttataacctttgcccggatgtacagtttttggcgacaccgccggttgacggcgcgtttgtccaatatatcaaaatgcgccaggactttgttttctcgattccggattcactatcctatgaagatgcggctttgattgaaccgttttctgtcggcattcatgcggccgcgagaacgaagcttcagcccggttcaacagttgcgatcatgggaatgggtcctgtggggctgatggccgttgcggcagcgaaagcatacggggcaggcacaatcattgtgaccgacttggagccgctgcggctagatgccgcgaaaaaaatgggcgcaacgcatgtcatcaatgtccgggaacaggatgccggtgaagaaatcaaaacgatcacgaatggcagaggcgttgatgctgcctgggaaacagcggggaatccggcggcattgcaatccgcactggcttccgtgcgccggggcggaaaactggcgattgtcggtttgccttctcagaacgagattccgctcaatgtgccgtttattgcagataacgagattgatatatacggaatcttccgttatgcgaatacgtatccgaagggaatcgaatttcttgcttcaggcattgtggacacgaagcatctagtaacggaccaatattcgctggagcagacgcaagaggcgatggagcgggcgcttcaatttaagaatgaatgtttaaaagtgatggtgtatccaaatcgctgagtgaacagggaggatcttcgtattctccctcttgtttactggaaatgaaaacggattcttggggtgggaaatgatgattgaaacagaaaaagtaacggcaattaaagtgaagcatcagtcaaaatccagtaccggactgtcctggtttgaacgaatcggttatggattcggcgatatgtcgtataatattatctttcagtttgtaaacgcatacttattattttattatacagacgtcggcggcattcagcctgcggtgatcgcaactttgtttcttgttgtgcgtgtgctggatgctatttttgacccgatcatgggattgattttagataaaacgaatacaaggtggggaaaagcaagaccatatttgctgtgggtggcatttccttttgcgctattcacattcttatgtttcacgacgcctcattttggtgagaccggaaatatggtatatgcgtatgtcacttatattctgcttgggatgtcctttagtatgcaaacgatcccggtgaacagcttaacggggcggatgacgaattcggtggaggaacgaacggttctgaccacaacccggatgattttggtgtatatcggcattcttttatccatttcctgtgcgacaccgcttgcaactgctatcggaggagagaatcaggcgtttggatttcaaatgactgcgcttatctatgcggcggtcagcatcgttttgaatctattcagtttctttactgtgcgggagcggattcagcctaaaaagagaaaaaaacaagggatcaaaaagacgttatccgttttattccaaaacaaacccttgcttatgttaatttcatcatttttggcttttgcgatcgggtttaatattaagctcagcacgatggtgtattattttacgtataacgtcaaccataaagagttcgtgtttatgggcaccgttttatttttcggggcagcgctgatcagcaatttgtttattcctttcttttctgagaagtggggcagaaaacaagtcatgatcatcacggcggctctatcgcttatttcttatgccggcctgcattttacgccgttttcttccattacactcattttcatttggcttttcgtttcgggatttttcacaacgcctttaaatacgcttgcttggggaatggtggctgattgcgtcgattatgcggaatggaaaaccggagttcgcgcggacggtgttgtgatttcgagcatgagctttattaataagctgggtgttgcgttagccgggtcattttcggccatttacttaggaatcgccgggtatgtggcgaatacagaccagacagttgcgtcattgaatgcgattaaaaatatgaatgctttgattccgggatttttcattttgctttctattattcttatcgccttctatcctttaactgaaaaaagatataagcacatcatctctgagctggagcaaaggtctgcgagataaatatatgtaaaattgttaatattcaatattgtatttatggcagaaagtaatatactgagactgtaatctagactttataaatgagtgtgataatatgcgtagtcattctgtagtttgtattggggaattgttgattgatttcttttgtaccgatgttgacgttgatttaatggtagggcgccaattcctgaaaagtgccggcggcgcaccggcgaatgtgtcggcagcgattgctaagctgggcggagacgcggctttcagcggaaaaacaggcaaagatccgttcgggtattttctgaagcagacattggacgccgcacatgtcgatacctctatgctcgtcatggatgagaaagcgcctacaacgcttgcgtttgtttcattaaaacaaaatggggagcgcgactttgtgtttaacagaggagcggacgctttgttaacgctggatgatattgatctggaaaaggtaaacgatgcgaaaatccttcatttcggatcagcgacggcattgttatctgatccgttttgctcagcctatttacggctgatgtcgattgcgaaagacaatggacagtttatttccttcgatcctaactaccgtgaggatttatggaaaggaagagtttcagagtttataaacaccgcaaaaaaagccgttgccgtaagtgattttgtgaaagtcagtgacgaagagcttgagatcatcagcggtgcgaaggatcataaagaaggtgttgcggttcttcatgagctcggggccggcattgttgcggtgacactcgggaaaagcggtacccttctttcaaatgggaaggatattgacatcattccgagcattccggtgacatcaatagactcaacgggagcgggagatgcgtttgtcggcgcggcgctgtatcagctggcgcgcacggatgagattcagacggcagccgaagattttgcgaagctgcgtgatattgtctcatttgccaataaggtgggggcgctcgtgtgcactaaaatcggtgcgattgatgctttgccgagcttaaaagaggttggagtgactctgtaaaatatcgaggatgcttcttgaaagtcatcggacttcgggaagcatcctctttatttaggtctgaaacccttttcgatatacggtatactttagaaaagcatccagtaaattgaaccgatgtgaagtacatacaatcacgtttttatcagttctgagtaaaaccaagtttctgctgctgccgtcatgtatagtgtgacggcccatgatattgaaccgcggaggaatgtttttcatgaaacatgtttttcttattgtgcaatgcgcgttttctgttttttgttttctctgtctcgccgctgtgaattggtatcaggggagtgagcttgtttctgattcgtttgattggaatgatacggcgaaattttcaaagcttttgaatgggacggatacgattacaagtcctgaacagatttcgcagcttgatttctttgtgtatgctgcgaaacattatccgttaatgagcgggttgatgatcgggctgtttgtttattttttgttctcactgtatctggtcataaagaatttccgccggcacaaatgggctggatgagactattttcatataaaaatacataaattcatgagaaaatgaaacttttttcgaaaaaaacagtatagataactatgaacttgttactatttaattttgggaggaaaatgaaaaatgagtattttaggaagatttaaagacatcatgtcaagcaatatcaatgcgctgctggataaagctgaaaaccctgaaaaaatggttgatcaatatttgcggaatctgaacagtgatttaggaaaagtgaaagcggagacggcttctgtcatggctgaggaacagcgggcgaaaagagcgttaacagaatgccaggctgatgccgaaaagatggaaagttatgcgatgaaagcgttgcaggccggcaatgaagccgatgcgcggacatttttggaaaggaaagcggctgttgaatcaagactgactgagctgcagacggcttatcagctcgcttcttccaacgcgtctcaaatgcgcaaaatgcatgacaagcttgtcgctgatatcggagagcttgagtcgcgccgaaatgccatcaaagcgaagtggtctgtggcaaaaacgcaggagagaatgaacaaattggggtcctctgtgtcaaatgcgggccaatcgatgacagctttcggcagaatggaagacaaggtcaaccaagcgcttgatcatgccaatgcgatggctgagctgaacgcgtctccgaaagacgatattgacgagctgacggctaaatatgacagcaatcaaagcagtgtcgatgatgaattggcggcgcttaagcagaaaatgcttttcagtaaagatcaatagacagcgggctgcagctttgtccgatataaagagaaagtgagagaaacagaatgatcatttcttataaatgcccgaactgcggcgatgatatggtctttgacagttcatccggcatgctgacatgtcacagctgcgggcggcaggatcagattgaaagcctgccaaaggagtatataacgacgagattttccgaaaatgaggcgaacgagtaccgctgtgaaaattgcggcgcggtattaatgactgaggcggaaacgacggccacgacgtgcgggttttgcggaggagccgccgttctcgccgaccgattatcgggaaatctcgcgccttcgatggtgatcccttttacgatcagcaaggaagaagccatgagcgcttttaaaaagtggtgccgaaacggccggctgacaccgaaaggatttatgtctgccgatcgggtgaagagcataacgggcatgtacgtgccgttttggatgtttgatttaaacagcaaggttcaggtcaatgccgtttgtacgagagtgcatcactatgaagatggagaataccgggtgacggagaccgagtattacaacgcgtaccgcgatatcaatcttgattatctcaaaattccggtcgacgcttcagaaaaaatgaatgatgaattaatggacaaattggagccttactcatacagtgagctgaaggagtttaatacggcctatttagcgggatatattgcggaaaagtacaattataccgatgacgatctctttccgcgggcgaaggataaaatcagccattatattgattcttatatcagatccaccttctccggatatacgacggctgacattacggatgagcagattcagaccgataaaatcagcagcttttacgtactgcttccggtctggatggtcagctacgactatgagcgggctgagcacatttttgcgatgaacgggcagacgggcaaggttgtcggcaaaccgccgatcagtgccggaaaagtggccgcgtggttcggcggcataaccgccggtgcgtttttagcattaagactcgtctcacttatgataggaggcggtttttgatgaaagtatcgataaaaaaagcgtgtctcttctgcttcgtcctttttctgatgctgtcttttggtttacatacatcggcgtctgccgcggaacagaagcaatatgtttatgacaatgctcatttattaacgaaggatgaaacgaagaaacttgaggaattggccgggaagctcggggcaaagcgccataccgattttatcattcttaccgcaaacggaacgggcggtaaggacatcgagcagtacgccggtgatttttatgacagtcattttagcggaagcacggcgattttgaccattgatatgaaaaatcgggaagtatttatctccggatataaaaaggcggagacgtatttgaataacagccggctgaatacgatcagaaatacgatctcgtcagatatttccgcaggccattatgaaaaggcgtttcagacctacatcaagatggcttataaagatatggggaaaagcccggacgacaagtctgacaatctgctgctcacatggtggtttcagctgattattgccgcagccgcggccggcatcgccgtcactgtgatggtgtacaattccggcggcaaggtcaccgtcaccggcagcacgtatatggatcacgatacgtctgaagtgctgagccagcacgacacatatatccgcaccgacgttacaagagaaaaaaagcctgataaagataatgacaatgacggcggagtcacgaggggcggcacgagttacagcggaagcaagggaagtttttaaattatatgtaaaggatttgagcatacatgggttttttcagaaatcagttagcaaatgtggtggaatgggaagaattcagagatgacatggttttctataaatggaacaaccgtgaaattaaaaaaggcagccgtctgatcatccggccgggacaggatgccatctttttatacaacgggaagattgaagggattttccgtgatgacggcgattatgatatcgaatcagaaatcattccgtttctatctacactaaaagggtttaagtttggctttaacagcggcatgcgggctgaagtgctgtttgtgaatacgaaggagttcaccgtgaagtggggcacaaaaaacgctatcaacattccggcggcaggtatgccgggcggtatgccgatccgcgcaaacggcacatttaacttcaaggtcattgactacatcggattgattgataagattgcgggtgtcaaagacagctatttagtggaggacattaaaatccggattacgtctattctcgatcagcttttgatgaaatggatcaccagagaaggaaaagacatgttcaatctgcagtcgaattcctttgaaatcggaaaagggattcaagaagatcttgatatgcagctgatcggagacggcatgtcgattacgggcttcaatattatgagctttaactatccgcaggaagttcaggatatgattacgaaaaacgcttcttacggcatggtgggcgatgtgaaccgctatcagcagatttccatgacggacggaatgtcatccggcaaaatgagcggaagcggcgccgcctcagacatggcaggcatgatgatgggaatgaatgcggcaaatcaaatgatgaaccaaatgaaccaaaatcagcagaaccagccgcagcaaaatcaaagtcagcagaatcaggggacggcaccggcgaacggctcggaaggagcggctaagccgaaattctgtccgaactgcggaacgaaaacggaaggcgcgaatttttgcccgaattgcggacagaagcttgcgtgacgatatacgaaaaagaggccttttttgggcctcttttttttgtcatgatttcattgtttgaacgatgagggatgtcagcgcttttgatccctcaggtatgagatggacgccgtccggtgtgaagtattcagggtgctgcaatgcttttgcgtgccaatcgacaagcgtcacatttttccgtgactcggcctgccggcgcaatgactcgtttactttgctttcccactgccgcggcacacgtgtgttgacaagatagatatcggcttttgaaaaggagctgatcagtgattcaatttggctgtttgtgaaatagccgttcgtccctaactcgatgatgaccgctttgttcggctgattaaatgacgcatattccgaagtgagctggagtgcttgagagacttgtcttcctacctttccgtcgatggtgacatgagggagggactgccgcaggtatgacgcaatgtccagcatcaccgagtcaccgatagccagcacgtcttgctgaggctgtgtttgttttggatcagccgttttttgagatgaccgttcctttttctcttcgtttttctttgtatttgatttgtctgttggttctttcttgtttgtgtctgacgcggtgtctgttttttcgccgctgtgttttttcttgctgtcatcttcttttgcaggctgatcgtgatcggccgtttcttgctgatcattttgcgcgtacgtccattgcggctgttttttctcttcggctattcctgacagcccgcccgcaaatacgagaatggcggcaagaatgaggccgagcgacattctgctgatgacagaggacgtcttccattccaaaaagcggttcagaaacacgcggcgtaaaaatggccggaagcccgcagtgcggatcggctgttcaatgaaatggtaagatagctcggcaagaatgaaagtggcgccgattctgacggcgcagtgccaataaaccggatttccgatttcctgcacgggtgtgctcagtacgataaccgggtaatgccaaagatagattccgtatgatctcgttccgatccagcgaagcggcttccatgaaagaacatgtcccaaaaagctgctcggatggcataaacatgcgacaagaaccgctgcggtgatactgatcaaaagcatgccgcccttgtacaagaagggttcatattcatccgtgtaaaagacgcaaagcagcagcgcggcaaaagccgcaagctccgtcccgtgaagcaggtgtttcatgctgctcggcagccgtttggaagataatcgtttcatcggccacactaaagctaaagcgcagccgatcagcaattcaaatgagcgggtatccgtcccgtaataaacgcggctcggatctccgccgggcacatacatcatactcattacgactgccgaacataacgcgaggaacatgaccgcggccgcaagccgggcccgtgttttacatatgtacattcccgcaagcagcaggaagggccatatgatataaaactgttcttcaatcgccagcgaccaaaggttttttaatggcgaaggggagccgaagctgtcgaaataagaaagctgatgaaagataaaccaccaattgcttatgtaaaaaagtgaggagaccgcatccccgcgtacggtatgcaggagctcgctgttaaacaatacgacccaaatgaccgtcgtgataatcatgagataagccgccggcagaagccgcctgatccggcgcacccaaaaatcacgcaaatcaagggtgatggcattgccttgggcaggcaatataatagatgtaattaaataccccgataaaacaaaaaagatatcaacaccaatgaaaccgccgtcggcccagttaaaattcagatgatatgcgataactgcgaggacggcaaaggcgcgaagtccatccagtccgggaatatagcggtgatgcagtgacttgtctgacatggtattcctccaataatgtgtgcggaaattctcgctgttttgcggatggctatggcagatttctgtacagtcttccatttgttccgttaattagacgcattcggaaggggattttgtttcagaaaaaatgaatgaaatgctgtgattttcttaaacttttcagcccccgtccggcgtctgatatatgaaaagggtcccttgtgcatcttggctgttgcgggacgaaagaaaaaatccatgatctgcggatatcatggatttttttctttctttatctgatgtagcggtctccgacaagcagcttggagatgacggaggtcggtattgtaaactctgtaacgcccatatatccgggtgccgcttcgtattcatcaaatgagatgacaagtttgtgcttatctgtaatataaaaattctggtcggcgcggatggctttaaaaggctccgacatatcattatcttcgacccagtatattttattcggatcttctttcatctgttttttcatttgttctttaatattttcgctgatgactttaatataacggtcatctttaaataaactctttaacgtaagcacggcctcattctttttatcaatcgtgatgtaacggctttgcgtataagatgaagcttgtgttttttcgatatcacggcggattgagatcaaatccgctgtgtcagtaacggtttcataatcgctgtaaatactgaggtggccttttttgctttttgaggtcgccttcataaattcctgatacagctctttgctttctttcatataatgccggttgatgctgtcttcgagtttatgatcggaaaggccggacagagcgggcgtttttacatcaatgcttgattggttcttttcttccttcatctccgtgaatgtgatggcttggacgactttgccgatgacggggattttagacatggcttgtgcggcatccggattgatattgacaacggcggtaaataagacggccgcagcgactgccgcggatgtcggccacatcacgattcgttttttcttcggtttttgctgaagggctttttcgacaatgctgtccagttccttaggaatgggtacgcttttatactcttctcttaattgttctaatctcttttccattaagaaagatcctccttcgtcagctgaatgcgcatgagcttcagccccctgtaaaggcgtgttttgacggtgttgatgttttcccccgtgatgtccgcgatttcttctaatttcaggtcttcaaagaaacgcagaatgataatggttttatattgatgcggcaggtcatcaagcgcttcgtgaaggtctgtgtctttgtagtgatcttcctttccgcggcttaaaaactcgatcgtttcatcgtccatcactttcagttttttctgtttgcggagaaaatcaatggccgtgcgcactaaaattttataaaaccagcttttgatcacatcggggtttttgacggattcgaccgatgtcagcgctttttgaattgattcttgaacaatatctaacgcgtcatccttgttctttacgtaactgtacgccagccggtaaaagtcttccttgcgctcagttatgcacgtcacaagcgacgctttggctgtttcgttcttcattgcttcaaagggctcctttttttaaaatacgtatcataggctgctgcctaaggatagacgggacagggtgaaaaatagtttgcgcagaggggatcatttttaaaaggaaaaggaaggaaagacgatgagataaaaaaaagagccggaacggctctttttcggatgtgttgatattcagctgaacggtttagttcggtttgactaagattttcacttggtttttctctttgattaaagcaccgaagccttcttcaatcagatcgtcgagcacgatttttttcgtgacgagcttatctgctgagaagtacccctctttcatcagtgcaagaacggaagggaagatgtcacggtatccgataatgccttttacggtccgttctttgatgacgatatcgttcggatgaatttccgctcctttttcccagatgctgacgataaccgtttcaccggcaatgtttgttgactggatcgcctggcggagaacgacaggaacgcctgttacttcataagaaacatcaacgccgccgtttgtgcgtttagcgatttcttcaacgacatcgtccgtttttgacggatcaatgatgatagcgccgagttctttcgctttttcctgacgttccggtgaaagttcaaccgcgtaaatatctgtggcgccggccgctttcagggcttcaatcacaagcagcccgatcggtccgcagccaaaaaccgccgccttgtcgcccgcttttaatttgctttggcggacggcgtaaagcgctaccgctgacggctcaacaagcgcgccctgttcgtaagaaagctcttcaggaagcttaaacagcaattcttcgtcaacggatacatattcagaaaatccgccgccgcctccagctaagcctaagaatcccatttgttcatcaaggttataggctccctgatgtccgtgtgtggcaaaaatcggttccacgacgacacggtctccgacgctgtaatttttgacgccttcgcccacttcaacgacttctcctgagaattcgtgacccatcgtgacgggcgccatttcgtttgttaacggatgaggtttgccgaccggaataaagatcgggcctcccaaatattcatgaaggtcgcttccgcaaatcccgcaccatttgactttaattttgactttacccggttctgctttaggttcatcaatgttttcgattcgaatgtctttttgattgtgccatcttgccgctttcattgattatcactcctagtctgattgaaacgagtataggtacatgatcaatatgaaccacggttaaaaggaataaagtgcctgcttcctaaagcctgatttctcaaaatatatcatattatgcaactatcaataggccttataaaaagtccatattgaatgcagaaatactctatgaatattataacgctaatgaattaaattttgtagtataatttaccatggaattatatagaacgggaaattgtgccgtcgttatgtgcatgtctcatcacgttgtaatgaacatgtaaagtgattgaaatattataatcgtcttcttggtgtataattttgcctagaataaagaatcaggaggacgaaagcttgaagaagttattcttagccttattgattttagcaggaagcacgctgggagcgatcagttactcttctgatgcaagtgctaaaaaagtgaacggaaatattacatggtataatggagtcggtaaaaaaggatcttccggtaaaaaactggggcactgggattgcgcgacaaaattaggatttgacgttccgagaaacggaacgaaaatcagagcttatgcgaaagcaaaaccgaaaaaggttatcactgtatacaaaaatgatgtaggccgtctgccgaatgccgtattggatgtcagcccgaaagcgttcaaagcgctcggatatccattaagcaaaggaagagtatccggacactacagctattaaaatagaccatcttaaaaagcaaggacactgattcttgctttttctgattgacggagagattgataatgaagaagaaacgatggatctggatgttgctggcagccgttttggcggcggcggtcatcgcgtccgttttactgattaaaggaaaaagcgacggcggcggaaaagccgttgtctccggcggccatgacaagctgcttgtttccattacagacaaagatctgatgacgaaatattacgaggacggccgcgtgctgtatgaggaaaagctttcggcatatccggcgtttgcgctggatgacgcccatcaggtgctctattttgtcgggaataatgaccaaaatgagatgcgtctctataagcttgatctgaagacgaaaaagaagacggtgctttataaaggaacggcaagcgctgacagtctgtttttatcaaaggatctgacgcacatttatttccgtctcggaaaagcggatgaagatattttccgtctcgcatcttttgatttgaaaacgaaacgttatgaaaatctgtatcccgccgccgatgagaaagacgacagtgtaagcagcttcttttataaccgcagccaaaacgattttgcgcttctgcattattccgtaaaagaggattatcaaaaaacggatgaggcaaatgagaaggggattgaccctgaaccgacgaatatccggtttgcagcaggagcgggcgaacaccttcaggatctgacaaaccttgaacagtttatcagcgacgtggcggtgtcaccggacggaaagaaccttgtctttacatcttatacccaaaaagggacggaacaaaaagcgtccatccgtctgatgaatgtcaaaacgaaaaaagatgaaacgattatctcaaacgggaaggacttcgctccgctgattgatgcccagcctcagttttctaaagacggcagcatcatttatttcatggcggaagcaaaaggcgctaagcgtctgaaggatgaaacggggcggaatgcgaaggtccggaccatttatgcttatcatttggatacgaaaaaatgcgaaaaagtctgggaaaatgacaacggcattatcaacagtttttccgtcatccaatcatgaaaaaaacactcagcgcccgctgggtgttttttaatgaacaaagctggctgcggctgaggcgagccatttgaaaaaacggagaatcggaacggcaaaatgaagcgtttcgatgaatgactgtgcggcaaggttcattttccgccgttttgccatttccttcagatctttctgctgccgatcgtttttcatgttcattgctcctttgcatcataaaaggaaatgataacgcaaaggcctctcatgagacatggaggccttctctatgttgagactcgtaaaagggaggtctaacttgatgccgtttggttattgttttggagatttaccaacgaacggacgccgtcgatcattttactgccgcaaagggggcaagtcggggtatcactgccggcaaaattctttctgctccagccgatacagtcctcttttgtgcattcccacgtactgacatcttctttaggcagcggttcctgattacgtttgttgtagtaagacataaagtcacttcttcccttatgaattttcgtgcactccttcattgtctcatacttttccctaatctcctaattcctttttctatccagatttccaatgagggtgcatcgtcttcctgttattacagtatatgcaaataagtgtctttttattttttctttttggataaataaaaaatccccttctctaaaaggggggatatttgtttactgcttattcgtgacgtccatcggtctcatcatgtcgtaatcttcatgttctagaatatgacagtgccatacgtagcgtccgctgtaaggagcgaaggtcgccgcgattctgatgacctctcccgagtgcgcctgcacggtatctttccagcctttttcacttggaggaggcgggacggcggggcctgtatacacaatgtcgccgaatttgttatagcgctctaagtcaaaaggacgccggtcaaggatttggaaggaaacaaggtgcaggtgtatcggatgggttccccccatcggattgataatcgaccagatttccgttgtgccgagcttcggcgcttctgtcacaggatcatgccatcgcttgttattcagcgtcaaaacgggccggccgtatttgtcttgcgtatttgtgagtttaagcgtcctgatattgtgtattctctttgatgtcacattaggcattgttgaaagatatttaggcttccggcttgtgtctgctcccttcagcggttttgtgacgcggaattgcatcacattggcgtctgtatccggatcggcgtcgcccccgcagccggtgccgttcgttaaaatgatatgttctccgtcaaaggcggagaaatcgatgagcacatcataccgctctgccggggctaagctgatagattgtgttttgacagagcggggaagcaatccgccgtcagaaccgatttgaataaacttcccgccgttattgagcgagagagaaaatgttctcgtattggaggcattaaggatgcggaaacgatatgtccgcggttcaacttccatatacggccacgctttaccattgacgagaatggtatttccgcaaaaaaacgggacgatggaagggtcgggcagcgtttcggaagggttagcaggtccgctcgggtaagacaaggaaccgtcgtcatttaatgtgcggtccaaaatcataagcggtacgtcatactctccggagggaagcttcagctgcttttcttttcgctcgcgaatgatatacatcccggcaagcccggcgtacacattgagcctcgtaatcgccatggcgtgatcgtgataccataacagagccccgcgctgtttgtttggataatggtatacctctctctcaaaataaggacccgtttccttaaaatcctttgtgaaccatgcttccgggtagccgtcgctgtccggcggcgttgctcctccgtgtaaatggacgacggttttgacatcgggttcctgatggccgctttctgaatggtgaatggtatgatccacgggcagaaaatgcttatccggaaggtcattcatccatttaatatagacgttttcatcttggttcacgtcgatcgtggggcccggaaataaaccgttatacccccacagccgggtcggcgggagatcgcggtgcagcttgtgaaagcattccttcatggtgacttcataatacgtgctgccgtctgatttcttctgcggctggagtgtttcgataatcggcagttcatctgcaaatttttctagagccatttttcatcctgtccttatcatttattgaaatcctgtactacagttaatgctgccttgaacaggttggttaaaaaaacacccgcccttttttgaggggggtgtttgcggttattgcgcaatccggctttcggaagcgctctctttcggtttttgttttttgcggaatacatatgaggcaagtaccagcagagtaataaatcctgtcagtagaaattcagaccgcattgaactgataaacagcatagataacaagatggcgcaaatggcgatgatcgtcaggtaggttaagtacggataaaaccacattttgattttaagagattcagggtttgtccgttcgattttctttctcattctcagatgtgagacggcgatgacgagatagacgagcagtgcgatcgcccctgatgaattgaccaggaacaaaaatacggagtcgggagaaaagtagttcataacaacggcaatataggagaaaaaggtgccggcgataatggcttgaaccggtacgcctcttttgctcagtttcataaaacgccgcggcgcttcatttcgctctgccagtgaatacagcatccgtgacgtcgtataaagcccggagttcaggcaggacagaacggctgtcaggacgatgaaattcatgatttgagcggctgcgggaaccccgatatggctcaaaacggcaacgaaggggctttccaaaatattggctgaatcccacggcagcagtgtgaccacaaccgcaatggaaccgacgtaaaaaataatgatccgccaaacgactgagcgggtcgcctttgtgacggattcgaccggatttgacgtttctcccgctgcgattgcgacgatttcagatcccatgaaagaaaaaatgacaacgacgatgccgagcagtacggaacttggacctttagggaaaaatccgccgctgcccgccagattttccagcccgaccggtttgctgccggggacgattccgaaaatgaatgcaaatcccgcgattaagaagacaacgatcgtcgctaccttcactaaggaaagccagtattcaaattcgccgaacgatttaactgaataaatattcgtcagtgttaacagcacggtcagaagcagactcgtcagccatagcggaatgcccgggaaccagtactgtatgattccggcgcctgcaatggcttcaatggcaatgacgatgacccagaaaaaccaatacagccatccgatcgtaaaaccggcccaaggaccgatggcgtcatgcgcgtactgtgaaaacgaaccgcttgtcgggttgacggaggacatttcccccagcattctcataataaaaatcactaataatcctgctaaagcgtaggagacaatcgctccgggtccggtggaatgaatgacggatccgcttccgacaaataatccggcgccgatcacgccggcaattgaaatcatagtcatatgccgggtttttaatccctttgataaagagttaggctgattcattctttgcctccttttggtttgtttatgctgaatattcagacaagtattattctatcataaatgccacaggcagttgaaaatgatgtaagaaaatatgacatttttttctcatccgtacagcagaaggtgccggaaggaaaagaaataattttctgttatttctgtgttttattggttttgaaaataattccatgaacgtgggttggcgagaatccttgatacgattgggatgagaggggttttgtgaatgaaaataagtttcctgagtgcataaatgttctatgcttactatttttctgtggaaagtgaatcatgtttctatagacccactgtgtcctcgctttgtatgataatgaaggaaaaattgaacgggaaggaggattttcagtggagagatatcatgaattgaaaaaaggcgaaaccggagcgattgtcagtattggcgcatatgcggcattgtcggctgtgaagcttgtgatcggttatttgtttcactcagaagcgcttcaggccgacggtttaaataatacgactgatatcgtggcatctgcggctgttttcatcggtttgcgcatctctcagaaacctcctgacgaagatcatccttacggccattttcgggcggagaccgtcgcgtcactcattgcttccattattatgatgcttgtcggaatgcaagtgctgttcagcgccgcgcaatctattttttccgttaaagaggaaacaccggatatgatagccgcctggacggccgcggggagcgccgtggtgatgctgatggtctgccgctatacgaaagggcttgcgaaaaaggtaaacagccaggcgctttcagctgcggccgctgataataaatcagatgcgctcgtcagtatcggcacgtttatcggaatttttgcttcacagttccatttggcttgggtggatacggttaccgcgtttatcatcgggctgatcatctgcaaaaccgcgtgggatatttttaaggaatcctctcattcgctgactgacggttttgatgtcaaacatatttctgattataaaaagacgattgaacagattgcgggcgtcagccgtttaaaagatattaaagcgagatatctgggcagctccgttcatattgatgtcgtcattgaagtgccgtcagatctgaacattaaagagagtcatgagatcgcaaatgaggtagaacgcaagatgaaagaggaacatgccattgaccattcacacgttcatatggagcctctccagctgaaataaagcttcctttctaaagggagctttttcctttttcagactggaaacaattcgctggaaacgtttttttatactgtttatattttgtggtaaagttaggttacgataattgaaatttgagagatgactaggaggagaagaatggcttataaagaagagctgcatccgctgctggagaaagccgttgagcatattgaaaacatcatcataggaaaacgggatatcgccatactcagtctggccgccattctcgcaaaagggcatgtgctgctggaagacgtgccgggagtcggaaaaacgatgatggtccgcgctttggccaagctgatcggagctgactttaagaggattcagttcacgccggatcttctgccgtcagatgtgacgggtgtctctatttataatacgaaaacgatggaatttgaataccgccctggaccgatcatggggaatatcgtgctggctgatgaaattaacagaacctctccgaaaacgcagtcttccctgcttgaggcaatggaggaagggaatgttacgattgacggaaagacaatgcggctggctgagccgtttttcgtcatggccacacaaaatccggttgaatatgaaggaacgtatccgcttcccgaagcccagcttgaccggtttttatttaagctgcgcatgggctatccgactgccgaggaagagcttcaagttctgtctttgcaggaagggcgcaatccgcttgaaacaatcgagcccgtcatttctaaagaacagtttatcagccttcagcgaaaattggagcaggtgcgggtggatgatggaattaaagcgtatatcgtcggcattactcagcatacccgccggcatccgtccgtacatctgggcgtaagtccgcgcggttcaatctcattaatgaaagccgcgcaggcgtacgcgctgcttcatgaccgcgattacgtcattcctgatgacgtccagtatttggctccgtatacgctgccgcacagaatgatcttgaccgccgaggcgaaatttaacgatgtgaccccggaagcggttatagaagacatcatgcaaacggaaaaagtgcccgttcaaaggatgtcggtccgctaatgagaaggaagatgcattggcttctatatggctggaagctgcttatgttggccgtactgacggcggctgtcttttcttatgccatgtttcagggcggatttgtgagctggtttttattttatgcgtttttgccgtttaccgtttacgccgggctggtcgctgtgtacccgttacgggcgtttcaggtggcgcgtgacgtgtcctccgcccagttaacctcaggcgacaggctgtctgtcaccatcaggctgacgaggcgcctgccgtttccgctgacatatatggtcattgaagatgtgatgccggaaacgcttggcgagaggcgcagtgcgaaacagctcgtgtttccgtggtttcaaaggaagctgacgttacaatatgagctgccgcaggtgccgcgcggagagcatcatttacatacgataagagtgcggacgggagatgttctcgggcttttggacaagacggcgtcgttttccgtaacggatacggttctggttttcccggcgtacgggtctgttcactataagccgcaggtctcatccggagaagagggtgcggctgccggcgctccgtttcaggtacaccgctcagcaatggctgcgagcgtcagaaattatcagccgggcgaccggttttccgcacttgactggaaaacatcggcgcggcgaaatgagctgatgacgaaggaatttgacccgctgcagagtgtgaatatgattctccttttggactgcaggccgtccccatcgtttgaagccgcggtatcagcttcggcatccctgctttacacggcgcttgtgaagggctctcccgcaggatttatttcattggggagcgaccggaccgtatttcccgtccgggagggagaccggcatttcagaaagatgctgcgttacctggcatcagcttcagaatcggaagaagccgatgcaggcgggcgtttaggaaaagagctggcggatccgcgcgtccgcaaagcttccattgccgtcgtgacgggcagtcttacagaagaccttctcaaacaggctgagcccggccgtgctgacatgacggtgtttttggcgaaagaaacgaatgccgcgctttcggagaaagaacggaaactcgctcttatcttcgctcaaaaaaatattaaggtgcaaatgatcagggacaaacgggtgtcccatgttgtttagaaagagaggtggcgtgccatgccgcatgacgagaaccagggaagcaggctgagtctgctgctgttttattttctcgcttttttattgttatgggaatggctcaggccgctgcacaattttacggatacaaaacataccggttttttcatcgtttttatcggtttggcatttctgctgtcattcttccggatgaggtggtacgtcaccgtgccgtcctgcattctgtttacgttgatcagtattcacatcctgttttataaaggttcggtttttcagccggaatggctcgtttcttttttgcgggacgtgatgcaaaatgcccgccacatcgggtccggaagatggaatgacatgaatccgtcattccgcacattgctgttttttgtgcttttatggctgctcgtgtatttgctgcattactgggtgatctatcagcggaaaatattattcttttttatcatgacggtggcgtatatcaccgtgcttgatacgtttactccttatgatgccgcgtacgccgtcatccggatcgtctttatcggctttttgatgatggggcttttgtatatggagcgcatccggcttacggaacacatagcgtttaaaaaaagattgatactcaaatggtttctgccgctgatgctgtttatctgcgcttccgtcgtgttcgggctggcggctccgaaatcagacccgaactggccggaccccgtgccgtttcttaaaaaaataacaaaccacaaagaagtgcccgccgccgaaagcaaaatcggctacggcaatcatgatgaaacattgggcggcccttttcagcaggatgatacgccggttttcacatggaagggaaaagaacgggcgtacttccgggtggaaacgaaggatacatacacggggaaaggctgggtggagaccgatcagggcatgtcctataaactgaacggaggcaacgtggaagatatatggtttgaccggagtgtgcagacgagacgatatacggcacaggtgtccattgatgagaattatctctataatcacgtcatgtatccgatcggcgtctccaatattaaaccgaagcactcgattcagcttgaaatgaacggaaacaccgagcaaattatgccggtcagtgaacaagtgggcaacatccgcaatatgggacggtacacggtgacttttcaggcgcccgtctttaagctgaatgatctcagaaaagtgaaagtgaaacgataccgtgagcagaatcaattcaatgaccgttatttacaggtccccgacagccttccgaaaagagtgagacagcttgcggacagactgacgcgggatcatcataatatgttcgataaagcgaaggcgatcgaggattatctcggatcttccgcattttcgtataatacacaggatgtcgcggttccggagcacaatcaggattatgtcgatcaatttctgtttgaaacgaaaagaggatattgtgataacttttcatcggcaatggctgtgctgctccgctctgcgggaatccccgcccgttgggtgaagggctatacatccggcgaatataaaggggcaggcgaccataatggccacatttatgaagtcacaaacaacaacgcccattcgtgggtagaagtgtattttcccgatcagggctgggtgacgtttgagccgacaaaaggcttcaccaatccgacggagtttacgtcagagcaaaatcataccgcggcaaaagacagcggaggctcagcggggaattcggattcatcgtctgacaagcagcgtcaggaaacaaagccggaaaaagaaaaaacaccgaaaaagcgggatcaccgtgcggcaccgcagcctgtgatccgcaacaaaaccgcggcacacctgtggccgtatgcagccatcgttatcgtgatttcagccgcggcggcactcgcctgggtgctccgggcgcgctggattccgcacgttacagcagccagattgaagcggcgaacgggtgaagacgtctttttcgacgcatatgccgcgctgctccgccagctgaaacgaaaaggattcagcaggggagacggagaaacgctgcgcgattttgccgcgaggattgacgaggcgtaccatacaaacgacatgtccgagctgacgctgcgctatgagcgggccttataccgcagggataatgcagcggagctttggaatgaatcgggacagttgtgggaaaatataattaaaacaagatagtcttgaccgcatatcgtcctgttgttagaataaatgaatgttaaatgggagcccgggagcgttaaaaagccgggcttccggacaagtcttgcgcgacagagggctgaacgtgtgtcctccgttttttctgtgtcaaaaacttagaggagattaggtgacaaccatgacgaagttagtgaatgaaatgattcttgttcttgatttcggcagtcagtataaccagctgattacccgccggatccgtgaatttggcgtatatagcgagctgcatccccatacgttgacagctgaggaaatcaaagaaatgaatccaaaaggaattatcctttcaggcggaccaaacagtgtatatgatgaaggatctttccgctgtgatgaaaaaatctttgaacttgatattcctgtattgggcatctgctacggcatgcagctgatgactcattatctcggaggaaaagtcgaggcggcaagccagcgcgaatacggaaaagccaacattcagattcaaggaacccctgacttgttcaaagatcttccggaagaacaggttgtgtggatgagccacggcgatttggttgtagaagttcctgaaggcttcactgttgacgcaacaagccatcactgcccgaattcagcgatgagcaaagcggacaagaattggtacggcgttcagttccacccggaagtgcgccactctgaatacggcaatgatcttctgaaaaactttgtattcggcgtttgcgattgtgaaggcaaatggtcaatggaaaactttatcgaaatcgaaatgcaaaaaatccgtgaaacagtcggagacaagcaggttctttgcgcgctaagcggcggtgttgattcctctgttgtggctgctttaattcataaagcgatcggcgaccagctgacttgtattttcgtcgatcacggcctgcttcgtaaaggcgaagctgaaggcgtcatgaaaacgttcagcgaaggctttaatatgaatgtcattaaagttgatgcgaaagacagattcttaaacaagctgaaaggtgtttctgatcctgagcaaaaacgcaaaatcatcggcaacgaattcatttacgtgtttgatgatgaagcggacaagctgaaaggcatcgattaccttgcgcaaggaacgctttacacggatattatcgagagcggtactgcaacggcgcaaacgatcaaatcgcatcacaatgtcggcggacttcctgaagatatgcagtttgaactgatcgagccgctgaacacccttttcaaagacgaagtgcgcgcgctcggcacagagctcggccttccggatgatatcgtatggcgtcagccgttcccgggccctggacttggcatccgcgtactcggcgaagtaacggaagaaaaacttgagatcgttcgtgaatcagacgcgattctgcgtgaagaagtggcgaaccacggccttgagcgcgacatctggcagtacttcacggttcttcctgacatccgcagcgtcggcgtcatgggagatgcgagaacgtatgattacacaatcggtatccgtgccgtaacatcaattgacggcatgacatctgactgggcgcgtatcccttgggatgtgcttgaagtgatttcaacacggatcgtcaatgaagtgaaacacatcaaccgcgtcgtgtatgacattacgagcaagccgcctgcaacgattgagtgggaatagtcaaaagaagcttagaatccttggtttataagggttctaagctcttttttcttttatagcaacaattgatccaatattattaattgaaccgtgaattttaaagaaaaagtattccacaatgggataataattaatgttgttttagaataaagtttgttcaaattaagcaaattaaagaaaccctctattcaaatacaactatttctccgacatctataaatccaaatcgcttatagatattttttccatcctctgaagcctgtaatacaactggtttttgtttatcctttgtttgctttagaagaaattgaaacatttcactgccaattcctttacctctaaatgtttcttttgtcatcacatcataaataccatagctatctttggtttctattaataaaccggtagttacaggcatttcatctttgcatccaataaacatctgaacttctgaacctaattttacttgtgaaaacgtattaaaataactttctagtgcatctttttctggtgtaccctcaaataagctcgtgaatatgtctatatattttaaaagttcttcatcatttttcacagcagtaatcataagctgatgggaaattctttgcccaacattaagagtattttcaagtttcatcattacattacgttccgcttcttttagatcatattcttgtataagttttgtccaatcctcagttaaatactgaggatcaatccaaatactaaagggatattttttatatgaaaaattatcgattccatgtctgatcttaactgtatttttgatatttggagatttcggtaatattacattaaatgtatcagtggggatttttgtatttgctatgatgaaatcttcttcctttgtaagctctccgctaactgtatgggtaaatgattttaatttttcttccaaattgtttatgactaattgttgatttgtaatcatgtttttgcacctttcaattcgatttagtgcgctttttttattataaggtcaactaaaacactaaatcacagtatttaccccctcccataatattcagaacacgggggagcaatatttttaatggtaacttctaaatcaaggaactacaaaccccaaaaggcttgatattcaataaattaattcttataatgtttagataccattgaatgggaataaatcaagataaaaaaacgtctcttttaaaaaagaggcgttttttttcatctttttgaaaccgttttgccccgattcatatctaacagtataggaggtggataaggtgaaggaagaacgattgatcaaaaaggcgaaaaaaggtgatgccacagcctttgaaaaactgatcacagctcatcaggagactttatataaaacagcttatctctatttgcatcacaaggaagatacgctggacgcagtacaggaaacggtttacaaggcttttctgcatatcgcgcagttgaaggagccgaaatattttcaaacgtggctgatccggattttgcttcatacgatttttgcgatgaggaaaaagcacggagacgtcatcccgtttgagccgcaacatgatacacgcgcggagaataagaacattgaagaatacatagatcttcggaatgccctggaaacgcttgacgaacatatacagctgaccattcagctttattattttcaagatttctcgattgctatgatcgctgaacagaccggtatggcggaaggcactgtaaaaacgcatctgcacagggcgagaaaagcattgaagcaggagctggaaaaggaggataaacatatatggaaaagcatcaaatgaagcaattgtatcaggacattgacgtgccgaaagctgaattgaaaaacgtgatacacagcgccgcagtccgtgccggaaaagaaggcgccgtcagacggagatggggacgaaaagtgataaacggcctcgcggttgctgctgctttgtttattctgtatctgtcctcaggcttattcatgccctccgttaacacggctatgggaaacattcctgttgccggacaaatttacagtctgtttcaggataaggcaggttctgcgctgtttaaaagcaatttggtgacaaaactgaatgagaaagcggaatcacgcgggattacggtgacagtgaaaagtgtgtattacgacagcggacagctcgtttacaattttaccgttgacaatttgaaatcagatgaggagagcatctcttttcaagttgattataaagatccacggaatatgttagcagaggattatgacagcagtgatatgaaaaaaatgaaagacgggcggtacgcggggcagcttcgcctgttcacggacggctcaaagctgaaagacggtgataagcttccgcttgtcattacacaaatcaaggatatccccggaaattggcgctttacacttccgatcaaaaaacaaaagtccgtttctcttgaaggaacgaaagctgtgaatgtaaatcacggattataccgctttttcgatatccgggcggaaaacggaacgatgggatcggctctcctgtattctatcgactttcaagatgcagctaaaaatgatgccatctcgattgacgaagcaacggatgatgcaggaaaccattatgaaatgacgatgtcgaatattgaacttggcggcagaaagaatcttcccggaggcgggaaaagaatacgcggccaaactcaattcagcaaaccgatagacccgaaagcgaaaacacttttcataacgggtaatttaaaatcagaatcagagccgggagaaatcgtgcctctgaaaacaaaactgcctgtcagttatgaaacgaaacatcatcatgtcggcattaccgtcaaaaagatcaaacagcaaggcagacgggtgatcgtcgattatcaattcacaggaattaattacagcaaagcggaaaaagatcagctgatcaatgtcggtgagtcaatcggtctcggcaatacgaaaaaaatgaaaacctggccatcagttgatgagtatgaaaaaggctattatctgaaaggaaataaggcgaaagtcatgaatcttaaaacgggtgaaatggaatccgtttttgaattggatgattcatccgataaagactattcgttgcgcgatttttcattcgattcatatgctttgtacgtcaatcaaacggttatgaacttgctggcggatgacagcggaatcacattcgcggtgccggttcggcctgcggacggaaaatgatgtatggaaggcggcttttgccgtcttccatttttggtcaattaacgaataaaccaattttttttaacgggattgttcgtttttttattgagttttcaaaattgaattgatacaatagactcagaaatcaaatatgcagatatcgtataatggcggggatatggcccgcaagtttctaccaagctaccgtaaatggcttgactacggatcaatctcaatcgtttgatataaataatccattcttatttattcagactgaacgtatgtagtcaagcgtcccaaatgtatttggggcgttttttatttggcggataacgggcagaataaatgggagagaatgaaggaggcaattggcttgaagcaattttttcagtttgatgagctggggacaagctatcgtaatgaaatcatcggcggtttaacgacctttttgtcaatggcgtacattctgttcgtcaatccgctgacattgtctttaaacggtgtgaaaggatttcccgaagcattaaaaattgatcagggcgcggtgttcaccgctacagccttggcgtctgcggccggctgtattttaatggggctcattgcaaagtatccgatcgcgattgcgccgggtatgggattaaatgcgttttttgctttctctgtcgtcctcggcatggggatttcatggcaggctgcgctttccggcgtcttgatttccggaattatcttcgtggcgctttcgctgacgggattgcgggaaaaaatcattaatgcgattccgcctgagctgaaattagcggtcggcgcgggtatcggtttgtttatcacatttgtcggtttgcagggttcgggcattattgaagcaaactcatcgactttggtgtctatcggcaatattcacagcggtcctgtgctgctgacggttttcggtgttattgtgacggtcattttgatggtgcttcgcgtaaacggcggcgtatttatcggaatgcttctgacggcggttgccggcatggtctgcggactgattccggttccgacgcacattgtcggcagcgtgccgagtcttgcgccgactttcggacaggcgtggatgcatcttccggatatcttctccgtacaaatgctgattgtcattttaactttcttgttcgtcgggtttttcgatacggccggaacgctggtggctgtagcgacacaggccgggctgatgaaggaaaacaaacttccgcgtgcgggaagagcgcttctggcggattcaacatcaatcgttatcggagccgtactcggtacgtctacaacgacttcttatgttgaatccagctcaggcgttgcggcgggcgcgcgctccggcttcgcggctgttgtgacgggcattctctttttgctggcgatgtttttctcgccgcttctgtcagttgtcaccacgaatgtgacggctccggctttaattattgtcggcgcgctgatggtggcgccgctcgggaagatcgcctgggataaattcgaggtggctgtgccggcattcttaacgatgattatgatgccgctgacgtacagcattgcgacggggattgcgatcggttttatattctacccgattacaatgatctgcaaaggaaaaggaaaaagcgttcacccgattatgtacgggctgttcgtcatctttatcctgtatttcatcttcttaaaataacggaaaaaccggctgaggaaagccggttttttgtttttgtcctattccgtaaaaccaatacatactataaaacgtcatgtgggtgtccgggtgaagaaaaccgcttgactgtttaaggacgcttcggtaccttatataagtgttttattttcttgtttaacaaattccgccgtatttttttgataggagttgctgacatgacggaagaaagaaaagaaacgttggaagaagaaaaacagcatcaggggactgatgaagaaccgctgtcgagaatgtccagaaatgctggacgttatcaaaagcaaaagaaaaaagaaaaggaacggcgcccggctccggcttttacggaaaaactcgcttctgcatgggccgcggtcaaacgttattgccgtttcgcgctgcgcattttgacatcaccggtgaaggtcgttggggaagacggcttttcccgctttaaatatgctcttatttcaatgcttgtattcagtatctttttctcaatcggaaattggtttcagctgagagcaagccagcaaaggcctctcggatacggggagcggcatcatacgttttttgacggctttaccgtcgttctcgtgtatacgctcgtcttttttgccgctgcggcgggcgcggtctggcttgtatcacgctatatgatgaaacagaaaatcacgatgcgggatgcggccgcgggggtcggatcgcttttggttccggctgtcgcctgctctatcgtgtggatgattttcgcgatattgaatctgccggtcatcaccgtggtgtttacggcgctgaccttgtttctggccgcctcggcgatggtgcagtttgtgcagattctatacaaatcggctgaaaagcctgcggctgacgtgatgtactgtatttccgcggcggttatcatcatgctcgtttttacggctgtgacatggccgcttatttccgagtactttactgcttcgctgatccctttataagtcgaaatttgtctttcacaatgtttacaaatttttctaataaagcgtgttgttttgaaaagccgtccgatatatgatgggagcaacagaaattggaaagcggcattaatctttatgattcggaaaggatgatgaagatggccccgttgttgcgagaagccattaatcggaaaaaacagcacctgaggacaaaactgatccgctcagggttttatcaagaccatgttcaggaactgtccggatacacgctgagtgaacttgagaaggaatatgaagccgtcaaacgattgaaaaaagccgagcttcactgataagagcttgaaagtctgccttgcggggcgggctttttttttcttttgaaaatgatgaaaagagggtaaactatccttaattgaaggattgatgcttttcaaagtatcagaggaggggaatcagtgatgcagacgattttatccaacagtataggtatggttctcattattctcatcattaacattatatatgtctctttctttacgatcaggatgattctgacattaaagggacagcgctatttcgccgcaggcatcagtacgattgaaatccttgtgtatgtaaccggcctgagtctcgtgctcggcaatctgaatcaaattcaaaacgtcattgcctatgcgctcggctacggcatcggtgttatagtgggaatgaaaattgaggaaaaactggcgctcggctatattacagtcaacgtcattacgaaggagcttgatctggacctgccgaaacagctccgggaaaaaggatacggggttacaagctgggttgcgggcggacttgaaggagaccggaccgccatgcagattctgacgccgcgcaaatatgagcttcagctttatgatacgattaaaacgcttgatgaaaaagcgtttatcatcgcctttgagccgaaaacgatccacggcggattctgggtgaaagcagtgaagaagaggagaattaaggaatgacaaagccaaaaaagaaacggtttgaagtaacggaagatgaaacgattgacaccattctcactttaatgaaggaagagggctatatgcccgtccggcggatggaagagccgatctttacagaaaagaaagaaaatggatcaattcaagtcgttccttgcgggaaaaaaatcgtatttgaagggaaattgatctaaacacgaacattaaaagaaagaatttttatatcgttcgataatgtcgttgacattatccaagtccgttgttaagataaacatgaaatcaaaacacgacctcatataatcttgggaatatggcccataagtttctacccggctgccgtaaacggccggactatgcaggaaagtgataaacagctgacatggatatcgcagaagcgaacgactgacgatacgcgcgccatgcccggtttgtattgcttcctcatagttgcaatataagccgggcttttttttctgaaaaacaaagcatgagaaggtgggaacagaatgcagccgctagcaggaatcatcatgggaagcacttccgattgggagacaatgaaacatgcatgcgacatacttgacgaacttcacattccttatgaaaaacaggtggtatccgcgcaccggacgcctgatttgatgtttgaatatgcagaaagcgccagagacaggggcttaaaagtcattattgccggagccgggggagcggcgcatctgccgggaatgacggcggccaaaacgacgctgccggtaatcggcgtaccggttcagacaaaatcgcttaacgggcttgattctcttctgtctatcgtacagatgccaggcggcgtgccggtcgcgacgacggcgatcgggaaagcgggcgcagtgaacgcgggtctgttagccgcgcaaattttgtcggcatttgacgatgacattgcggataaactagaggcgagaagaaatgcgacaaaacaaacggtgctggaaagcagtgatcagcttgtctgataaaaaaacgatttaccccggcgccgtcatcggcattatcggaggcggacagctcggaaaaatgatggctgtcgccgcaaaacaaatgggctataaagtcgctgtcgtcgatcccgtgaaagactcgccttgcggacagatcgccgatattgagattaccgcccagtacaatgaccgtgaagcgattcaaaaattggccggagtcagtgacatcattacctatgaatttgaaaatatcgattacgaggcgctcaactggctcaaagaacatgcatatcttccccagggaagcgagctgctgctcatcacccaaaacagggaaacggaaaaaaaggcgatccagtcagcaggctgtcaagtcgcgccttatcggatcgtaaacagcggacgggagcttgaggaagccgttcaggcactggggctcccggcggtgctgaaaacatgccgcggcggatatgacggcaaaggccaatttgtcattaaggaagaaggacagacagatgaagcggctgcgctgttagaaaacggcacgtgcatacttgaaagctgggtatcgttccggatggagctttccgttatcgtgacgagatcggtgcacggtgagatttcaacctttccggctgctgaaaatatccacaaaaataatattctgttccaaagcatcgtgcccgcgagagcggaggaaacggttcaaaagcgggcagaggcgcttgccgttcagctcgcggagaaattggaacttgtcgggccccttgcggtggaaatgttcgtcacggaagatggagaccttttgattaatgaactggcgccgcgtcctcacaactccgggcattatacgctcgacctttgtgaaacgagccaattcgaacagcacatcagagcggtctgcggacttcctctcggcagaaccgatcttctcaaaccgggaatgatggtgaatctgctcggtgatgaagtgaagcttgcggaggagcatacggagcttttaaaggaagccaaactgtacctgtacggaaaacatgagattaaaaaaggccgcaaaatggggcatatgacatttttgcggaagcctgatgaaacatggattcaggacatcacgaacatatggatgaaaagagacggaggacgagcataatgatcgaacgttattcaagacctgaaatgtccgcgatctggacggacgaaaacagataccaggcatggctggaagtcgagattttagcctgtgaagcctgggctgagcttggcgtcattccgaaagaagacgtcaaagtcatgcgcgaaaacgcgtctttcgacatcaaccgcattttggaaatcgagcaggatacgcgccatgacgtcgttgcattcacccgcgcggtttcagaatcattaggcgaagaaagaaaatgggttcactacggcctgacgtcaacagatgtcgtggataccgctctttcctatctattaaaacaggcgaatgagatcttgctcaaggacattgagagatttgttgacattataaaagaaaaagcgaaagaacataaatacacggtcatgatgggccgcacgcacggcgtacacgcggaaccgacgacattcggcctgaaactcgcgctttggcacgaagaaatgaaacgcaaccttgaacgtttcaagcaggcaaaagaagggatcgaagtcgggaagctttccggcgcggtcggcacatatgcaaatattgatccgttcgtagagcagtatgtctgtgaaaaactcggcctgaaagcggcgccgatttccactcagacattacagcgcgaccgtcatgcggattacatggcagcactggctttgatcgcgacgagcattgaaaaattcgcagtggaaatccgcggtctgcaaaagagtgaaacacgtgaagtggaagagttttttgctaaaggacaaaaaggttcatcggctatgcctcataaacggaatccgatcgggtcggaaaatatgacgggcatggcgcgcgtgatccgcgggtacatgctgacggcatacgaaaatgtaccgttatggcatgagcgtgatatttctcattcatcagctgagcgcatcattcttcctgacgcgacaatcgcgctgaattacatgctgaaccgattcagcaatatcgtcaaaaacttaacggtattcccggaaaatatgaaacgcaacatggaccgcacactcggtttgatctattctcaacgcgtgctgcttgctttaatcgacacgggtctgcctcgtgaagaagcatatgacacggttcaaccgaaagcgatggaagcgtgggaaaaacaagtgccgttccgccagcttgtcgaagcggaggaaaaaatcacgtcccgtctcacaccggaacagattgccgattgctttgactacaattatcatttgaaaaacgtcgacttgatctttgagcgtttaggtttatagaagaagccagccggaggcggcttcttcagccgcaatagattgaatattcccaacattcgggttaggaggccttccgtgaatattgtgaacaataatcttctttatgaaggaaaagcgaaacgaatttatcaaactgaagacgaacagattctccgcgtggtctacaaggattccgcaacagcctttaacggtgagaaaaaagcggagatcagcggaaagggccgtctgaacaatgaaatttcaagcctgattttcaaacatctgcacgccaaaggaattgacaaccactttgtggagcgtgtttcagaatcagagcagcttatcaaaaaagtgagcatcattccccttgaagtcgtggtcagaaacattgccgccggaagcatgtcgaaacgtctcggcatcccggaaggaactgagcttccgcagccgattatcgaattttactataaagatgacgcactcggtgatccgctcatcacagaagatcatatctggcttttaaaagcggcggctcctgagcaggtggaaacgatcaaatcgattacaaaacaggtgaatcaagagctgcagcatatttttgaagactgcggcgtcagattaatagattttaagctggaattcggcttagacgcagaggaacaggttcttttagcggatgaaatttctcctgacacgtgccgtctgtgggacaaagacacaaacgaaaagctcgataaagatttgttcagacggaacttgggaagcttaaccgacgcatatgaagagattttcaaaagactgggaggcatttcataatgtataaagtgaaagtttatgtcagcttaaaagaaagtgtgctcgatcctcaaggaagcgcggtgcagcatgcattgcacagcatgacctacaatgaagtgcaggatgtgcgcatcggaaaatacatggagctgacgattgaaaaatctggccgcgatcttgacgcgctcgtgaaagaaatgtgtgaaaagctccttgccaatacagtcattgaagactaccgatatgaagttgaggaggttgtcgcacagtgaaatttgcggtgattgtgttacccggctccaactgtgatattgatatgttccacgccgtaaaggacgaactcggcgaagaagtcgagtatgtctggcacgaggaaacaagccttgacggatttgacggcgtgctcatccccggcgggttttcatacggcgactacttgagatgcggcgccatcgccagattcgcaaacatcatgccggccgtgaaaaaagcggctgccgaaggaaaaccggttctcggcgtttgcaacggattccagattctgcaggagctcggacttctgcccggcgcgatgagacgcaacaaagatttaaagttcatctgccgaccggttgaattaatcgtgcagaacggcggcacgttattcacatcttcctatgaaaaaggacaatcgattacgattccggttgcccacggcgaaggcaatttctactgtgatgacgaaacgcttgaaagattaaaagaaaacaatcaaatcgccttcacatacggcggcgatattaacggaagcgtcagcggcattgccggcgtcgtgaatgagaaaggcaacgtattaggcatgatgcctcaccctgagcgcgcagtcgatgaactgctcggcagcgcagacggtcttacattgttccggtctatcgtgaaaaattggagggaaactcatgtcgctactgcttgaaccaagtaaagaacaaataaaagaagagaaactctatcagcaaatgggtgtcagtgatgacgagttcgcactcattgaatctattatcggaagattgccgaactacacggaaatcgggattttttccgtcatgtggtcagagcactgcagctataaaaactcaaaaccggttttacgcaaattcccgactagcggcgaacgcgtgctgcagggtcccggagaaggcgcgggaatcgttgacatcggtgacaatcaggcggtcgtgttcaaaattgaatctcataaccatccgtcagcgattgagccataccaaggtgctgcgacgggagtgggcggcatcatccgtgacgttttctcaatgggcgcccgtccgatagctgtattaaactctcttcgatttggtgagctcacttcacctcgtgtgaagtacttgtttgaagaagtagtggcgggaatcgcgggatacggaaactgtatcggaattccgacggtcggcggagaagtgcagtttgacgcaagctatgagggcaatccgcttgtcaatgcaatgtgcgtcggcttaattgatcataaagatattaaaaaaggccaggcgaaaggtgtcggcaacacggtcatgtacgtcggcgctaaaacgggccgcgacggcatacacggcgctactttcgcatcggaagaaatgtcagattcatctgaagaaaaacgttccgcggtgcaggtcggcgatcctttcatggaaaaacttctcctggaagcatgcctagaagtcatccaatgcgacgccttagtcggcattcaggatatgggggcggccggtctgacaagttcgagtgctgaaatggcaagcaaagccggctcaggcattgaaatgaaccttgatctcattccgcagcgggaaacaggtatgaccgcttacgaaatgatgctttccgagtctcaggaacgcatgcttctcgtcattgaacgcggacgtgaacaggaaattgtcgatatttttgataaatatgatcttgaagcggtttccgtaggtcatgttacggatgataaaatgctccgcctccgccataacggagaggttgtttgcgagcttccggtcgacgcgctggcggaagaagcgcctgtataccacaagccgtcagcagaacccgcgtactaccgcgagtttcaggaaacggaagttcccgcgcctgaagtaaaagatgcgacagagacgctttttgccctgctgcagcagccgacaatcgccagcaaagagtgggtgtacgatcaatatgactacatggtgcgcacaaatacggtggtcgctccgggctctgacgcgggagtgctcagaatccgcggcacgaaaaaagcgctggcgatgacgacggattgtaacgcccgttatttatatctagatccagaagaaggcgggaaaatcgcagttgccgaagcggcgcgcaacatcgtatgctccggcgccgaaccgcttgcggtcacggataatctgaatttcggaaacccggaaaaacctgaaattttctggcagatcgaaaaagcggccgacggcatcagcgaggcgtgcaatgttctcagcactcccgtcatcggcggtaacgtatcactttataatgaatcgaacggaacggcgatctacccgacgcctgttatcggcatggtcggcttaattgaagataccgctcatattacgacacagcatttcaaacaagcgggggatcttgtatacgtgatcggcgaaacaaaacctgagtttgccggaagcgaactgcaaaaaatgacagaaggccgcatttacggcaaagcgccgcaaattgatcttgatatagagctgtcacgccaaaaagcattgcttgacgcgattaaaaaaggtttcgttcaatcagcgcatgacgtatcagaaggcggcttaggcgtagcgattgcagaaagcgtcatgacgacggaaaaccttggcgccaacgtgactgtagcaggagaagcggcattattattctctgaatctcaatcccgcttcgtcgtttcagtgaaaaaagaacaccatgaggcgtttgaagcggctgtggccgatgcggttcatatcggtgaggtaacggctgacggacttctggcgattcaaaaccaggacggacaacaattggttcacgcgcaaacgaaagaacttgagcgcgcgtggaaaggagctattccatgcttgctgaaatcaaaggcctgaatgaagaatgcggtgtgtttggcatctggggacatgaagaagctccgcagatcacatattacggcctgcacagcctccagcacagaggacaggaaggcgcgggaattgtcgcaactgacggtgaaaaactgacggcgcataaaggacaggggcttattaccgaggtttttcaaaacggcgaactgagcaaagtgaagggaaaaggcgcgatcgggcacgtccgttatgcgacggcaggcggaggcggatatgaaaatgtccagccgctcctattccgttcgcaaaacaacggcagcctcgcgctcgcccataacggcaacttggtcaacgccacacagttgaagcagcagcttgaaaaccaagggagcatctttcagacttcctccgatacggaagtgctggctcatctgattaaacgcagcggacacttttcgctgaaggatcaaatcaaaaattcgctatctatgctgaaaggcgcttatgcctttttaatcatgactgaaacagaaatgatcgtagcgcttgacccgaacggactcagaccgctgtcaatcggcatgatgggcgatgcttacgtcgtcgcatcagaaacatgcgcattcgatgtggtcggcgcgacataccttcgcgaggtagagccgggcgaaatgctgatcatcaatgatgaaggcatgaaatcagagcgtttctccatgaatatcaaccgttccatatgcagcatggagtacatttatttctcaagacctgacagcaatatcgacggcattaacgtgcacagcgcccggaaaaacctcggaaaaatgcttgcccaggagtccgcggttgaagcggatgtcgtcacaggcgtgcctgattccagtatttctgcggccatcggctatgccgaggcaacgggcatcccgtacgaactcggtctcattaaaaaccgttatgtcggcagaacgtttatccagccgtcacaggctctccgtgagcaaggcgtcagaatgaagctgtccgccgtccgcggtgttgtcgaaggaaaacgggtcgtcatggttgatgattccatcgtgcgcgggacgacaagccgccggattgtcacaatgctcagagaagcgggagcgacagaggtgcacgtcaagatcagttcaccgccgatcgctcatccgtgcttctacggcatcgacacatcaacccatgaggagctgatcgcttcctctcattccgtggaagaaatccgccagatcatcggtgctgacacgctttctttcttaagtgtagacggattgttaaaaggagtcggccgaaaatttgaagacaccaattgcggacaatgcctcgcttgttttacgggcaaatatccgacggaaatttatcaggatacagtgcttcctcacgtaaaagaagcggtgctgacaaaataaaatctgaaaatgacataaaggcagcgggaattcaggctgcctttctctttctgccttttaaggagaaacgaattgacaaggagtgatagggatgtctgatgcttataaaaatgccggagttgacatcgaagccggatatgaagccgtcaaacgaatgaaaaaacacgtggagcgcacgaaaaggctcggcgttatgggaagcctgggcggttttggcggaatgtttgatctgtcagagcttccgtatcaaaagcctgttttaatttccggaacagacggtgtcggcaccaagctgaaactcgcattttcaatggataagcatgacacgatcggcgtcgatgcggtcgcgatgtgtgtaaacgatgtgcttgcccaaggagcggagccgctgtttttccttgattatttggcggtcggcaaggctgatccggtaaaaattgagcagatcgttcagggcgtggcggacggatgcgagcagtcaggatcagcgcttatcggcggtgagacggcggaaatgccggggctgtatacggctgatgaatacgatattgcgggcttttcagtcggcgtcgcggaaaaagacgaaatcgtcaccggtgaacatatcgaagaggggcatctcttaatcggacttacttcaagcggccttcacagcaacgggttttcccttgtgagaaaagtgcttcttgatgacggcggacttgatttggatacggtctatgaaccgtttgcgcgtcctctcggagaagaattgctggaaccgacgagaatatatgtgaagccggtgctcaaggcggtgaaaagcggtaaggtggacggcatggcgcatgtgacaggcggaggattcatcgagaacatcccgcggatgctgccggacggattgagcgcggaaattgataacggatcatggccgatcccgccgatttttccgtttctgcaggagcacggcaagctgaaagaagaagaaatgttcaatgtctttaatatgggcatcggttttgtccttgccgttaaagaagaggacttgacagacgtcatcgacacgcttgaagctcagggcgagaaggcttatctgatcggccgggtcaagcggggcgaaggcatttctttcggcggtgcggctctttcatgaaaaagtttgcggtatttgcttcaggaaacggatcgaacttcgaggccattgccaaacgcatgagagaagagaagtgggatgcggagctctcgcttctcgtgacggataagcctcaggcaaaggcggtggaaagggcggaggctttacacattccgtcattcgcctttgaaccgtcatcttttgaaaacaaagcggcctttgaacgggccgttattgaacagctgcgcctgcacggggcggaattaatcgttctcgccggctatatgagactgattggagatacgctgcttgaagcatacgggggccgcattattaatatacatccctcgcttcttccggcattccccgggattgacgctgtcggacaggcgtatcgggccggtgtgaaagtggcgggcattaccgttcattacgtcgacgaaggcatggacaccggaccgattatcgcgcaaaaagcattcgaaatacaggaaaacgatacgcttgaaaacatagagcatacaatacacgagcttgagcacaaatggtatccgagcgttgtgaaacagctgctgggactaaataacagaggtgaaaaggcatgacaatcaaacgcgcactaatcagtgtttctgataaaacaaatctcgtacctttcgtaaaggaactgacagagctcggcgtcgaagtcatttcgaccggaggaacaaaaaaacttcttcaggaaaacggtgtggatgtcatcggcatttcagaagtgaccggatttcctgaaattatggacggacggttaaaaacgctccatcctaatattcacggcggactgcttgccgtaagagacaatgaagagcatatggcgcagatcaatgagcatggcattgcccccattgaccttgtggtcgtcaacctttacccgtttaaagaaacgatttcgaaagaagacgtaacatacgatgaagcgatagaaaacattgatatcggcggtcccggcatgctgcgcgccgcatcgaaaaaccatcaggatgtgacggtcatcacagatccggccgattacagctccgtgctcaatgagatgaaagaacacggcggcgtttcgcttaaaagaaaacgcgagcttgcggccaaagtattccgccataccgcggcatacgacgcattaatcgctgattacttaacacgcgagaccggtgagaaagaccctgagcaattcaccgttacatttgagaaaaaacaatcgctccgctatggtgaaaaccctcaccaagaggctgttttctatcaaagcgcacttcccgtctccggttccatcgcggcggcaaaacagcttcacggcaaagagctttcttacaacaatattaaggacgcagatgcggccgttcaaatcgtccgggaatttacagaacccgcagctgttgccgttaaacatatgaacccgtgcggagtcggtacgggagcttcaattgaggaagcattcaataaagcgtatgaagctgataaaacctccattttcggcggcatcatcgcgctgaaccgtgaagttgatcaggcaacggctgaagcccttcacggcatctttttagaaatcattatcgccccttctttcagtgaagaagcgctgaacgtactgacggcgaagaaaaaccttcgtctgctcacgcttgacgtgtccgcatcagggaagaaagaaaaacagctgacatccgtacagggcggtcttttgattcaagatttagacgtccatggatttgatgacgccgacatcagcatcccgacaaaaagagagccgagcgagcaggaatgggaagatttgaagctggcctggaaagtcgtcaaacatgtgaaatccaacgcgatcgttcttgcaaaagaccatatgacggtcggtgtgggagcggggcagatgaatcgcgtcggttcagcgaaaatcgccattgagcaggccggagaaaaagcgaaaggcagcgcgctcggatcagacgcgtttttcccgatgccggatacagtcgaagaagcagcaaaagccggtgtcacggcgattatccagcccggcggatcggtccgcgatgaagattcgattaaaaaagcggatgaatacggcatcgccatggtattcaccggcatcagacatttcaaacattaagagggggaacgaagcgtgaatgtattgattatcggaaaaggcggcagagagcatacattggcttggaaagcggcgcaaagcccgcttgttgacacggtgtacgccgcgcccggaaatgacggtatggcagactgcgcgacgctggccaacattgaagaaagcgatcatgccgcactcattgcgtttgcgaaagaacatcatgtcggcctgacgattatcggccctgaagttcctctgattgaaggaatagcggacgagtttgaaaaagccggactgcttgttttcggaccgtctgaaaaagcggcaatcattgaaggaagcaaacagtttgccaaggatttaatgaaaaaatacggcattccgacggcggagtatgagacgtttacttcatttgaagaggcgaaagcatatgtgcagcaaaaaggcgcgccgattgtcattaaagcggacgggcttgccgccggaaaaggtgtcacggtcgcgatgacggaagaagaagcgattgaatgcctgcacgattttcttgaagatgagaaattcggcgaggcgagcgcatctgttgttattgaagagttcctcgccggcgaagaattttctttaatggcgtttgtaaaaggggagaccgtctatccgatggtcatcgctcaagatcataaacgcgccttcgatggagacaaagggccgaatacgggcggaatgggcgcctactcaccggtgccgcacatttccgatgatatcgtcagaagcgcagtcgaaacgattgtgaagccggcggcaaaagcaatggtaaaagagggacgttccttcacgggcgtgctgtacgcggggctgattctgacgggaaacggatcaaaagtcattgaattcaacgcgcgcttcggagatccggaaacacaggttgtcgtgccgagaatggaatctgacctcatccaggtgcttttggatcttctgcatgagaaggatgttgacctaaggtggaaggatacggccgctgtcagcgttgtactggcctctgaaggctatccggaaggctatgcaaaaggcacgccgatcggcagtttgacgtccgctgaagacgggatcgccgtttttcatgccggaacgaaaaaagacggcggacaatttgttacaaacggcggccgggtcgccaatgtcacggcatttgctgagacatttgaagcggcgagagataaagtgtacagcgccgtttctgggctgacaaaacccggactgttttacagaagcgacatcggcgcccgtgcgctgaaagcttctcagcgataaagaggaaaaccccgtgtcatataagatgcgggttttcttctgaaaagacgactaagactgccggcttgccgtgtgacatgcagtcatcgatgaagtcttccggcgtatagacggattcttctcagactcgcgggacaggagaaattaaataacaagccgaaacggcttgttatttttcttgctgatggctgtcatcctgattcattccggtttggaacatatatgtcaccggacagaagcggaggatgccggacgccgctttcatcgcgcccatcatcatacagaagagatgcatcttgcaccaaggttttctcgtgtatttcgctgaagcagcagacaaaatggtgaggccgcaagtgatgcgcataacggcatttaataaactgatattcggtttcatcatttcagctcccttagaaaaagttttttattcatcttcaataatttgtaacgttttagccgtgcgataattgtgcggatgtgatacgatgggtctaatataagcgaaggagagtatgtgaatgtccgaacgtacctttaactggaaaaacaaagacatcagatcacaggcggatgttgtagactcaaagctgcttccaacgctacttttacgggatgctctcgtattaaatccttttttaaaacaatggctgaaaaagaatgtctggatttatggagaccgaattgtatatgttggtcatgagcttcctgatgcagcagagcacattcataccataaattgtgaaggaaaatacattgtgccaggttacattgaaccgcatacacatccttttcaaatatataatccccaaacgctcgccgaatatgtgtctcaattcggaacaacgacgtttgttaatgataacttgttttttcttttgcacagcggtaaaaagaaagcgcttactatattggaggaactgaaaaaacagccggtgcaatacttctggtggtccagatatgatctgcagactgaagtgctgaatgaggatcagcttctttcttttgatgtccgcaagcaatggatggagcacccggatgtcattcaaggcggagaattgaccggatggccgcgcctcatggacggcgatgacctgatgcttcattgcatgcaggcgacaaagaaactgcgcaagcggatagaagggcattttcccggagcctctgaaaaaacattgacgaagatgaaactgttcggagctgattccgaccacgaggcgatgaatggcggcgaggtgatgagacggcttgaattgggctactatgtttcgctcagacattcatccatccgccctgatttgagaacgattttgcaggatctccatcaaaaaggcttccggcattatgatcatttcttctacacgacggatggagcgacgccgcatttttataaaggcggcatgacgaatgaattaatcaaaatcgctttggaggaaggagttccggcgatcgatgcctataatatggcctcctttaatatcgcgaagtattatcagatggacgactttctcggtgtggtcggtccgggacggcttgcttcattgaacattctcgatgacccgatgaatccggacccggtcacggtgatctccaaaggaatcctgctgagggaagacggccgaaatatgaatgcgtttacagaaacggattggaaaaagggcggtcttgtccctcttgagctttcatatgatatgacgatggatgatttacagttttcaatgccgatgggtgtgaccatgcgcaacgcggtcattatggagccgtatatgattgcaattgataattctgttgaccagctttcttttgatcatgatgaatgctatctcacgcttctcgataagcatggaaaatggcgggtcaatacaatgctgaaaggttttgccgatcgggtgcagggctttgtcagttcctacacgacaaccggagatattatcgctgccggaaaaaataaagaagatatcctgctcgctttctcacggatgaaagaaatcggcggcggaatcgtgcttgccgaaaacgggaagattctgcatgagattcccctcgccttaaacggttctgcatctgcggagaagtatgaagaagtgcttgagaaagaacaaaaactgaggatgttgctggaggagcggggctaccgattctgcgatccgatctatacgctgctctttttgcagagcacacacctgccttatatccgcattacgccgagaggaatatttgacgtgatgaaaaaaactgtactctttccatcgataatgcgttaaaatataaaagcagggagccgacatatgaaaagatggaaaaccgtttgtatgctttgttttgcgtttttgctgcttgccgcctgccggcagaacaatgccgatcaggtgcagccgaaagaagcggaagctcctttaacggggctgaaaactgagcagaagcttgcagaacgccgtccgattgcagtcgcagtgaacaatcatccgaaggcgaggccccaatccgggctgtcaaaggcggacgttgtcatcgaagcgctcgcggagggccggattacgcggtttctcgcgatttttcaaagtgagatgccggaaacggtcgggcctgtgcggagcgcgagggaatattttgtcacgctcagcagcgggtttaacagcatatttgtccatcatggctggagtcccggcgcaaaaaagcagctggagtccggagcttacgattatataaacggtttggattttgacggaagcctgttttggagagccgatttcagcaagccgccccacaattcctacacgtcgtatgacaatatcaggaaggcggtggaacaaaaaggatacaagctgaacggaaaaacagaaccgctcccatttcagacatcagatgcaaaaccaggaaatgaaacctacaatattcggatagattatggaacacaaaacattacaaatcttgtcgaatacgattatgataaaaaagctgatgcttatacaagaagctctgatggtgtgaaagcgacagaccgggagaccggaaagcctttagccatgcacaacatttttattgttgaagccggccatcgcatgacagacaaagatggaaggcgggccatcgatattcagtcaggggggaagggcctcctgcttcagcacggcgatgttatggagtcagactgggaatataaagacggccgtattctgcccgtaaaaggcggtgagattcttccgtttgtgccaggaaagacatggattaatatcgtgcctgatctcgatgcagcttccattagtaaaggagaaggtgtttgacgatgcaaatcgataaattacgcggaaaagaactggaccagttatttttatctattttatcgctgaaagatctggaggaatgctatcgtttctttgacgatctttgtacgattaatgaaatccaatcgctggcgcagcgtttggaagtggcgagaatgctccgcgaaggaaatacgtatcacaaaatagaaagcgaaacgggtgcttccacagcgacgatttcccgggtgaagagatgcttaaattacggtaacgacgcctatgaaatggcgcttgaccgcgtaaacaaaggagaatcctcctcagctacgtaaaaaaccgctctgccgatgacggcaggcggtttttttatgcgtgctgattcaaaaggccgggaagttccctcaggcttccgtcttcctccctgtatacgatgtgttcagctgagaaatgaatcggcgagctgatgcccgccgccgcggcaaggtgaaacagcccttcacgcaacgagagcacgtagttgcagacgcggtgctgtttatcttcgatactgagcgcgcgctgaagttttggatcggttgtcgccactccgacaggacaatgattggtgtggcatacttgagcgcggatacagccgactgaaaacatcattccccgggcaatattgacaaaatccgcgcctaacgcgagggcaacggcaatcttatccggagtgagcagctttccggatgcgaaaattttcagcttatctcttatcccgtatgtcttcaaaaggccgtcaacaaggggaaggccggtcagaatcggcaggccgacggaatccgccagctcatggaaagaagctcccgttcccccttcactgccgtcaatcgtaataaagtcgggaagtttgcctgatgaactcatacaggaaataaggtcttcaaggtctttgcggctgcccgggacaattttgatgccgaccggtttttcaccgacagtccttaatttctcaatgaaatcaagcatgtccggaacatttgagaactcgttgaagcggtttgggctgtcaatggattgtccgggctgcacatttctgatggcggcaatttcttcggtcacctttgaaccgtcaatatgcccgcctcttgcttttgccccttgcgcaagctttaattcaaaggctttaatctgctcgaggcggctttttttcttaaattcttcccatgaaaattctccatcttcagtgcgcacgccgaacagcccggggccgatttggcagataatatccgcgccgcctttcaagtgatactcagacaggccgccttcgcctgtattcatccatgtgccgccggcctggtgcagcccttttgacagggcggtgattgcacggtcgccaagtgagccgtagctcatcgctgattgtccgattaaccctttcacataaaacggcttcttgcatgtgtcgcggccgatcacttgaacatcgtccggatgcaggtaataagggtccgcttttgccttttcgcggtgttcgctgcgtttcagcaggttgtctttgtcaatcttgtataccatcgtgtcgatcttcggcgtctgatctgcgcgcagctcctccctttgtttcgggaagagggcgttacggatataatagcccggctgatcgaaatcccgttctgagccgaagcccatcattctgctcttatactttccggacatgaccgtctgttcatattctctccgggaaaacggctgttcttcgttatcattgctgaataaatactgccgcagctcaggtccgattttttcaaatatatagcgcagttttcccgctacgggataattgcgcagcactgaatgttcttcctgcttttcgtctcttatgtatatccagagaaacaatgcggcgggaactaaaataataaaaatcaatatacaaatcagtacgataatggcttgttccattgagatcagactccttgtcttttttctctttgacattccacatattgtctgttttcaaacatagccgtttcccgtccggcggagcgcaatctttttttgtgaatcaggtgaatgacgtctttttccgtttttccgggccaaacgaatttgttataatgtttaaatggcaagaaacgaatggaggaacgaaaacgcatgtacgatgttaacgagtggaagcatgtttttaaactcgatccgaataaagatttaccggatgaacagctggaacggctttgtgaatcagggactgacgccattgtgatcggaggaagcgacaatatcaccgaggacaatgtgctgagactgatgtcaaaggtgcggcggtttttagtgccgtgcgtacttgaggtgtcgacgattgattccattgtgcccgggtttgatctttatttcattccgagtgtgctcaacagcaaaaaggcggactggattgtcggcatgcatcatcaggcgatgaaagaatacggagagctcatgtcaatggaggaaatcgtgacggagggctactgcatcgtcaaccctgattgtaaggcggccgctttgacggagtcggatacacatatagaaacagaagatattctcgcctatgcgcgggtcgcggaacatttgcttcatctcccgattttttatctggaatacagcgggatgctggcggacatagaaacggtggagaaaacgaaggctgtgctggacaagtccgtcctgttttacggaggcggcattaaagacgcggaaacggcggaacggttcggccgtcatgccgatgtcatcgttgtcggaaatgccgtatatgaagattttgatcaggcgcttaaaacggtggcggctgtaaagacaaagtagccaagcggacgaaattgatttatgatagaacatatgtttgataggcggtgaacggatatgaattacattagcaatcaattattaagcggattaaatcccgttcagcaggaagcggtcaagacgacggacggtccgctgcttctgatggcgggcgcgggaagcggaaaaacacgtgtgctgacgcacagaatcgcatacttaatggcggaaaaacacgtggcgccatggaacattctggcgattacatttacaaataaagccgccagagaaatgaaggagagggtagagagcattctcggacctggcgcggatgaaatctggatttccactttccacagcatgtgcgtgcggattctgcgcagggatattgacagaatcggcatcaaccgaaatttctccattcttgatacggctgatcagctttccgttattaaagggattctgaaagagcggaatatcgatccgaaaaagtttgatccgagaagtattttaggctccatcagcagcgcaaaaaacgagctgatcgaacctgaggaattcgcaaaatcggccggcggctactacgatcaggtcacgagtgacgtgtataccgattatcagaaaaaactgctgaaaaaccaatcgctcgattttgatgatttaatcatgacgacgattaagcttttcgagcgtgtgccggaagtgcttgagttttatcagcgcaaattccagtacattcacgtagacgagtatcaggatacgaacagggcacaatacctgcttgtgaagcagcttgcggcccgtcttgaaaatatctgcgtcgtcggtgactccgaccagtccatttacagatggcgcggggcggatatcgcgaatatcctttcctttgaaaaagattatccgagcgcaaacgtgattttgctcgagcaaaactaccgctcaacaaagcggattctgcaggcggctaacgaagtgatcaaaaacaattcaaaccgcaagccgaaaaacctgtggacggaaaatgacgaaggcatcaagctttcttattacagcggcgacaatgaattcggcgaaggccaattcgtcgcgggcaaaatttatgagctgcacagctcgggccggcggaagctttccgatatcgcgattttataccggacaaacgcccagtcgcgcgtcattgaggaaacccttttaaaatccggactgaactacaatatcgtcggcggaaccaagttctacgacaggaaagaaattaaagacattctcgcatacctgcgccttgtgtcaaacccggacgacgacatcagttttacgcggatcgtcaatgtgccgaagcggggcgtcggcgcaacttcgctagaaaaaatcgcttcatatgcggcgatgaacggaatgtcaatgttccaggcgatcaaacaggttgatttcatcggcgtcagcgcgaaagcggcaaacgcgcttgacggctttggcgcgatgattgaaaatctgacgaacatgcaggattacctgtccattacggaactcacggaagaaattctcgagaaaacggaatacagagaaatgctgaaggccgaaaaatcaatcgaagcccaaagccgtcttgaaaatatcgacgagtttctttccgtgacgaaaaacttcgaacaaaaaagcgaagacaagtctctcgtcgcgtttctgactgatttggcgctgattgctgatattgaccagctcgaccagaaggaagaagaatcaggcggaaaggatgccgtcactttaatgacactgcacgccgctaaggggcttgaatttcctgtcgtgttcttaatgggcatggaagaaggcgtgttcccgcacagccgctctctgatggaagaagccgagatggaagaagaacgcaggctcgcatatgtaggcattacgagggcggaagaagaactgtatctaacgaatgccaaaatgcgcaccttattcggccgcaccaatatgaatccggaatcccgctttatcagggaaatacctggcgatttattggagaacctaaatgagaagaaaacacctcgcatgcagccgggaagaaaagtgcagccgaaacgcgggcccgtatcccgtcccgtttcttatgcgaacaaaacaggcggcgactcgctcagctgggcggtcggcgataaagcgggccataaaaaatggggcaccggaacggttgtcagcgtaaaaggagaaggcgaaagcaccgagcttgatatcgcattcccgagcccagtcggcgtgaagcgtctgcttgccgcttttgcgccgattgaaaagcagtaacctgaagaggaaaggaagaacatgatggacaaagaaacagcgaaacaccgggcagaagaattgcgccgcaccatcgatcagtacagttatgaatattacaccttagatgaaccgagcgtgccggattccgagtacgacagactgattcaggagctgattgccatagaggaagagcacccggaactcagaacgcctgattcgcccacacagcgggtcgggggagcggtgcttgaatcgtttcaaaaggtgcagcacggcacgccgatgctcagtctcggcaacgcatttaacgatgatgatctccgcgattttgaccgccgggtccgtcaggctgtcggtgacggcgtcgcttataatgtggagctgaaaatagacggtcttgctgtttctctccgttatgaagacggctatttcgtcagaggcgcgacaagaggagacggaacgacgggcgaagatatcacggaaaacttaaaaacgatccgcaacattccgctgaaaatgaaacggaatctttccatagaagtgcgcggagaggcgtacatgccgaaacagtcatttgaagcgctcaatgaagaaaggctgaaacatgaagaggagccgttcgccaatccccggaacgcggctgcgggctcactcagacagctcgatccgaaaattgcagcgaaacgaaatcttgacatcttcgtctacagtatagcggagcttgacgagatgggtgtggaaacacagagtcagggcctgaattttctggatgagctcggttttaaaacaaaccaggaacgaaaaaaatgcgccacgatagatgaagtcattgaaatgatcgaagagctgcaggcgaagcgggccgatctcccgtatgaaattgacggaatcgtcatcaaagtcgattcgctcgaccagcaggaagagctcgggtatacggcaaaaagcccgcgctgggcgattgcttataaattcccggcggaagaggtcgtgacaaaactgctcgatatcgaactgaatgtcggaagaacgggcgtcattacgccgaccgccgttctggaaccggtaaaagtcgcgggaacgacggtctcaagagcatcccttcataacgaagatttaattaaagagaaggatatccgcattctcgataaagtggtcgtcaaaaaagcgggcgacatcatccctgaggtcgtcaatgtcttaatcgaacagcggaccggggaagaaaaagaattcaatatgccgaccagctgccctgagtgcgaaagcgagctagtgcgcattgaaggagaagtcgcgctgcgctgcatcaatccggaatgtccggcgcagatcagagaaggcctgattcactttgtctcacgcaacgcgatgaatattgacggactcggagaacgtgtcatcacacagcttttccgtgaacatctcgtccgtaatgtcgctgatttgtataagctgacgaaagagcaggtcatccggcttgagcggatgggggaaaaatcaactgacaatctgatcagctccatccaaaagtcgaaagagaattcgctggaacgcctgctgttcggtctcggcatccgttttatcggctcaaaagcggccaaaacactcgccatgcattttgaaagcctggaaaatctgaaacaagctacggaagaagagctgcttgcggtggatgaaatcggcgaaaagatggccgatgccgttatcacctatttccgcaaagaagaaatgcttgagctattgaatgaacttgagaaactcggtgtgaacacactctacaaaggcccgaaaaaagtaaaagcggaggacagcgactcttattttgccggcaaaaccatcgtgttaaccggaaagcttgaagagctgtccagaaatgaagccaaggcgcagattgaagcgctcggcggaaagctgacgggatctgtcagcaaaaaaacagacttgctgattgccggagaagcagccggaagcaagctgacaaaagcgcaggaattaaacattgaagtatggaatgaagcacagctattgggagagctaaagaaataagaggagtgttttctattgaaaaagatgttggcattggcggcgacggcaacggcggcagtactcatgctgtcggcctgttcgccgagtttcggggggaacaaagaggaagagatcacgcagaaaacggcaaagtcttctgaaaaagcgatcataccgaaatataatatctctgattcctactataaaatggtgcttccgtttaaggccggaaaagcgcgcggcctgaccgcggaccggctgaacacgaggctggacatcgatgaattcgagacgggtctgatgcggctcgctcaagacacgttcccgacggatgactatttgtatcaggaaggccagtatttagatgaggacacggtactcagctggcttgaccgcaaaaaagagggcagtgatctgaaaaaggcgaaaaaggcagacgccaatttccagaatctcggcttaaatcccgtgctgccaagctcgggatcggcaaaagagaaaaatgaaaacagcccgatttacttagcgtccatgcttgagcaggattacttagtaagaaaagataaaaattccatccagcttggcggtatcatgatcggtctcgctctcaactctgtatactattaccgtgaaaacacaggtgatccgcagcaggaagtggagctcagtgacaaaacgatccgcagccacggtgaagaaatcgcccaggaagtcgttaaccgccttcggaaaatggataacctgaaaaatgtgccgattaccgtcgccctttataaacaagcgccgaaaacatcaatcgtaccggggaattacattgcaaaaacagaagtcaaggccggctcatccaccatttcaaactgggatgatgtcaaagaaaagtacgtcttctatccggcggatacagacacggcaaaaaaataccctgatgattccgaagtatttaaacgcttcaaaaacgccatcgacagctacttcccgaattacaccggagtcgtcggaacggcaatgtacgaaaacgatgaaatgagaaaaatgaagattgaaatcccgatgcaattttacgggaaaagcgaagtcatcgccttcacccaatacttaacaggtgagctgatggattattattcaaaaggctcagttgatgtcgaaattaacattacctcgtctgacgggcaggaagcgctgatcgtccgcaatgcgggtgacaaagaaccgaccgtccatatttacgattaaccaagatgcccttgttcatttctgtatgagcaagggtttttttattgtgaatatcgttggagcgaggaatgaggtatgttaagatatttgtataatcaggaattaacaggaaaacacatttcatttctaagcggatgttactaatctgctgtgaaaaaagaagggcaggaatgttgatgaatgacatttgctgagtacacacaccgcctacaaacgttatgaaaagggtgaatcagcatgcataaagatattaaagcgatttttgaggaagataaggtgctggctgaggccggtgaaatatatggatttaccaagtttcaatttattgcggacgcagagaactacgtatatgaaattgtgaaagataacgaaccgtatatcttaaaaattacgcatacgatcagaagaacaccggaatatattctcggagaaatggaatggcttcatcatctggcaaggggagggctttcagcagcaaagccgattccttcattaagtggcaaagatgtcgaagaagtcccggatggaaaaggcggagcgtttttagtaagagtctatgaaaaagcgcccggacgcaaagtggaggaaccagactggaacggaaccctgttttacgagcttggaaagtacacggggaacatgcaccggctgacgaaaagctaccgtctgagcgatccgacatataaaaggcaggaatgggatgaagaggagcagctgaagctgagaaaatacgtacccgcagatcagcatctcgtatttgagcgggcggatgctctaatggaaaaactgcgccgtttgccgaagaaccctgaaaactacggccttgtgcacgccgatctgcaccacggcaatttcaattgggacaacggaaaaatcactgcatttgattttgatgatatcggctacaattggtttgtgaatgatatcagtattctgctgtacaacatgttgtggtatccggtcatcccgtatgaagacaaggccgcgtttacgggtgaattcatgactcactttatgaaaggctacagggaagaaaatgaccttgaccccgcctggcttgaacacatcccggattttctccggctgcgccatatgctgatctacggattattgcatcaggcgtttgacctcaattcactcggggacgaggaacttgagatgctgaaaaccttcaggcgtgatatcgaaaatgaaaccccgattacggagtataacttttctgcattcatataaatagaaaaacgccggctgaatccagcccggcgttttttttttatagcgtatcacacttcactccgacgacaccctgaatttctttaatatcataatagacgtcagtggtgtagcggtttttatgaacactgactttcacttccataatcggaaattctttttcgcgcagatcatcaatccggacggagtgaatgcggagctgtttgcttttcatttcctttaaaatctcggtcattttgtctttatcggaaagagacattctcacgcggatatctttttccttcaagcggttgggaccgatttttctgatcagccacggaagaaattcgacactgatcaggataaacaagaggcttgcgaacgcctctttataaaagccggcgcctgtagccagaccgagcccggctgcgccccagatgatagccgatgtcgtcaggccggatatgacgtcattgcttttacgcaggatcacgcccgcgccgataaaaccgacgccggaaatgatttgggcgggaaggcggagcggatccatcatgattcggtaatattttgggaaatgatatgccgcattaatgctgacgatcgtcagcatacaggagctgacggcgatgacgatacaggttttcagtccgagcggtttgtttttcagctcgcgttcaagaccgatgatcatgccgatcagcgtggcaatgcccagctttaataaaatgtctggttcgataggccagctcaatttgcacagcacctccgcaatttttcttataataaattgatatgattttctcacagtatttatagcaggacaagtgcggaagaaaaaagccgtcagggataaaatctgacggctttttgtctatttcttgtttttcaaaagagcttccatccggctgaacagctgataagaagcatcggccggttttttggtcagcaggctgacggcaataccggcaatcagactgaggaagaaccccggaatgatttcgtatacgccggttgaagcggcaagccctgtcgtgatccagattaaaacggccgcggccccggtaatcatcgccgcaagcgctccccattcattcatccgtttccagtacagactgagcaagagcgccgggccgatagccgaaccgaagcctgcccacgcatatccgaccagatcaagaatggtgctgttcggattcatggaaagcaaaatggcgataacggccacgatcaataccgacaggcgtccggtcatgaccaattctttatcgctcgcttcccgtctgaaaaaggcgcggtataaatcttccgtaatggcgcttgccgttacgagaagctgtgaggaaatggaactcatgatcgccgctaaaatcgcggacagcaagaagcccgtaatcagcggatggaacaagattttagaaaaaataatgaaaatcgtttccggatcttttacggagactccgaagtgatgagaatacgcaacgccgataatcccggtcagcaatgagccgacaactgaaataaacatccagctcatcccgattctgcgggcgggttttaaatctttcacttctttaatcgccataaatcgtacgatgatatgaggctggccgtaatagccgagtccccatgccaaataagaaataatgctaatgacgctcgcgcctttaaagatatccaatagtttcgggttaacggcgttgatcgaatcaatcgtcgttgaaacgctcccgagctgggtaaaagcaacgatcggcacaagcactaatgccgcaaacatgatcgctccctgtacaaagtcagtcagactgacagcgaggaaaccgccaaacagcgtgtaaagcacaacaacaccggccgttaaaaacaaaccgaatttgtagtcggcgccgaatgccgattcaaataacctgcctccggataccatcccggacgatgtgtacagtgtgaaaaagatcataataatcacggcggaaacaattttcagcaatgatgacgagtggcggaaccgtttatcgaaaaaatcgggaatcgtaatcgcatcatccgcaacttccgtgtaagcgcgcagcctcggagcaagcagcagataatttgaatacgcgccgatcgtcaaaccgagcgccagccataaggtcgataaccccgttgcgaacattgcgccgggaactcccatcagcatccatgcgctcatatcggccgcacctgcggacagcgccgttacgaacgggccgagtcctcttccgcccagcatgtaatcattaatattcgttgtcttcctgaatgcgtaccagccgattaacagcatggcagcaaagtaaatgccaagagatataattaattcaatactcacgtttttggaccctctcttctttcatgtaaatgttgcatcacctctgtagattagtagtgccggaatatgcgccggcgatccagcctttagtcatcattccatgcggatcgcatgatttagtgctggctatggttactaaacctaacaaagtatccccgatcaatcaactctcgaaacctggcccgctcaaggaaaaaatccccgccaacatagaacagcttagagatgaaaacgctaccaataaattataaaagtaaaaattttctgacatataattcgtttctctttctccccgatttaggataaaatagagagggtttcatcatgcctcagaaggcggcgttttgttgctttagagggctcgtttttgatatgatcagtattatatgacgaaacggagaattatgcggaggtggatcttatgtcacgaatttctatagaagaagtaaagcatgtcgctcatttggcgagactcgccattacggatgaagaagctgaaatgttcacagaacagcttgacagcatcatctcgtttgccgaggagcttaatgaagtggacacggataacgtggaaccgacaacacacgtgctgaaaatgaaaaacgtaatgagagaagatgaagcgggtaaaggccttccggtcgaggatgtcatgaaaaatgctcccgatcataaagacggctatgtccgtgtgccatctattctggattaaaggagggagacagtatgtcattatttgatcacaaaatcacagaactgaaacaaatgatacataaaaaagaaatcaagatttccgatcttgttgatgaatcttacaaacggatcgcatccgtggatgataaggtgcaggcgtttttacagcttgatgaagaaagagcccgcgcttacgcgaaagaacttgacgaagcggttgacggacggtctgaacacggtcttctcttcggaatgccgatcggcgtcaaggacaacatcgtgaccaaagggcttcgcacaacatgctcaagcaaaatcctcgaaaacttcgatccgatttacgatgcgacggttgtggagcgccttcaagccgctgaagccgtcacgatcggaaagctgaatatggatgagttcgcgatgggttcttctactgaaaactccgcgtacaaagcgacgaaaaacccttggaatctcgatacggttcccggcggatcaagcggcggttccgcagcggcggttgccgcgggcgaagtgccgttttcactcggatctgatacgggcggctccatccgccagccggcttctttctgcggcgtcgtcggattaaagcctacatacggacgcgtgtcgcgttacggtttggtcgcttttgcgtcttcactggaccagatcggaccgatcacaagaaccgtagaagataacgcattcctgcttcaggcgatttcaggcccggacaaaatggactctacgagcgccaatgtcgaagtgccggactttctttcttcattaactggcgatattaaaggcttaaaaatcgccgtaccgaaagaatatctcggagaaggcgtcggcaaagaagcgaaagaatcggttttagccgctttaaaagtgcttgaagacctcggagcgacatgggaagaagtatctctgccgcacagcaaatacgcgcttgcgacgtattatctgctgtcttcttccgaagcgtctgcaaaccttgcgcgctttgacggcatccgctacggctaccgctcagacaatgcggacaacctgatcgacctttataaacagacacgctctgaaggattcggcaatgaagtgaagcgccgcatcatgctcggcaccttcgcgctcagctccggctactatgacgcgtattacaaaaaagcgcaaaaagtgcgcacgcttattaagaaagattttgaagacgtatttgagaaatacgatgtcatcgtcggaccgacaacgccgacaccggcattcaaaatcggcgaaaaaaccagcgatccgctcacaatgtacgccaacgatattttaacgatccctgtcaacctcgcgggtgtgccgggaatcagcgtgccgtgcggatttgcggacggactgccgctcggactgcaaatcatcggaaaacacttcgatgaaggcactgtataccgcgtcgctcatgcttttgagcaggcaacagatcatcataaagcgaaacctgaactgtaaggggtgaaatgaagtgaactttgaaacggtaatcggacttgaagtccatgtggaattaaaaacaaaatctaaaattttctcaagctcaccgacgccattcggcgcggaagcgaatacccaaacgagcgtcatcgacctcggctatcccggcgtgctgcccgttttgaacaaagaagcggtcgaattcgcgatgaaagccgcaatggctttgaactgcgaaatcgcaacggatacgaagtttgaccgaaaaaactatttctatccggacaacccgaaggcatatcaaatttctcaatttgacaagccgatcggcgaaaacggctggatcgaaatcgaagtcggcggaaaaacgaaaaaaatcggcattacccggcttcaccttgaagaagatgcgggaaaactgacgcatacgggcgacggctattccctcgttgacttcaaccgccagggcacgccgcttgtcgagattgtatctgagccggatatccgcacaccggaggaagcttacgcatatctcgaaaagctgaaatcaattatccaatacacaggcgtttccgactgtaaaatggaagaaggttcactgcgctgtgacgccaacatttccctccgtccgatcggccaggagaaattcggcacaaaaacggagctgaaaaacctcaactctttcgcattcgtgcaaaaaggccttgagtatgaagaaaaacgccaagagcaggtgcttctgtcaggcggagtcattcagcaggagacgcgccgctacgatgaagcgacgaaaaaaaccattttgatgcgtgtcaaagaaggttcggacgactatcgttatttccctgagcctgaccttgtcgagctctacattgatgacgaatggaaagaacgcgtaagagcaaccattcctgagcttccggacgagcgccgaaaacgttatatcgaagagctcggcctgccggcttatgacgcaatggttctgacgctgacgaaagaaatggctgatttcttcgaagaaacggtcaataaaggcgcagaagccaagcaggcatcaaactggctgatgggtgaagtctcagcttacctgaacgccgaacaaaaagagcttgaggatgtcgcactgactcctgaaggccttgccggcatgattaagctgattgaaaaaggaaccatctcgtctaaaatcgcgaagaaagtctttaaagaattaattgaaaaaggcggcgacgcagaaaaaatcgtcaaagaaaaaggcctcgtgcagatttctgacgaaagcgtgcttctgaagctggtaacagatgcgcttgacagcaacccgcagtcaattgaagacttcaaaaacggaaaagaccgcgcgatcggcttccttgtcgggcagattatgaaagcctcaaaaggacaggccaacccgccgatggtcaacaagatcttacttgaagaaatcaaaaaacgataaaaaaaagcagccgcctgcaagggcgctgctgacacggagaccggtaagcgccggtctctttttttataagatgaaataggtttcaatggaagcccgcagcgtttcaatctgctcatttccgctgcctgccaagttggacagcattcctttaataatcggttttcgcggctcttcctttgcacattcctcttcaatgacttcaagcgatacgaggacgtcctcaggcagctcctgctgtgcttttatcttttgaatatccgcaagcagtctttctctgtccgccgcgggctgagtgaagatatcctcaggcagcagcggatcgggattgtctcttatcagtcccgtaatcagatcatcaattctggcaatcagaaaggccgccacgttttccgtccggaatgccgtatgttcattaaaaatcaagaaatgaatataggagctcacaattccttgcgccataacggacgcatccgctaaaaacggtgtgacggcatctccgtaaacggagagcaacgcatcccggtacagcatgttaaattgaatattggcctcatgaaaatactgtttgaccttttgattttcaggaatgaccttttcgctcagcaagagaatgataaagtccttgtgttccataaattcctggaattgatatgcgatttgttttcggaatacgtccttaggcggtttatgctgatgttctgttttgattttctttatttcttccatagacatgccgatgtaatactcacatgctgacagcaaaaggtcttcttttgatttgaaatggagatagaaggctccttttgaaattccgcattcgccggcgatttcctgaatggttgttgaagaaaacccttttttggcaaataaatggatgcctgtttttatgattttctcttttttttcgttcatgacgtgcttccccttaatcctgaaaaatttagaaaaatttactgccttattagttgacgatgttgagttataccgtttagtattatatagaatgaccagtcagtcaataaaaattaacggaggacatgatgaaccacattattaactttgtactgaagaacaaattcgcagtttggctgatgacgattatcgttactgtagcagggctgtatgccggtatgaatatgaagcaggaatccataccggacgtcaacatgccttacctttcagtaaatacgacttatcccggagctgctccgagtcaagttgcggatgacgtgacaaaaccgatcgagcaggcggtccagaatttagaaggagtgagcgtcgtaacgtccacatcctctgaaaacgtctcatcggttatgattgaatatgattacaacaaggatatggacaaggcgaaaaccgaagtcgctgaagcgctggacagtgtcagccttcctgacgacgcgaaaaaacctgacatttcccgttacagcctcaactctttcccgattttgacgctcagtgtgacaagcggcaaaagctcgcttgaagacctgaccaaaaatgtggaaaacactctcgttcctaagcttgaaggcattcagggcgttgcgtccgtgcaagtttccggacagcaggaagagcaggtggaattctctttcaaagacaaaaaaatgaaagagtacggacttgatgaagataccgtcaagaaagtgatccaaggctctgacgtcaatacgccgcttggattgtacacattcggcaacaaagaaaaatcagttgtcgttaacggagatattacatcaattaaagatctgaaagatatgaggattccggtcacatcttcttctgccgctcaaggtcaagcgggcggagccggtgcggcatctgcggcggacgctcaggctatgcagcaggcacagcaaagcgcgtcagcaggggtgccgacagtcaagctttctgacattgccgacattaaagatgtgaaaaaagctgaatccatttcccgcacgaacggaaaggacagcatcggaattaatatcgtaaaagccaatgacgccaacacggtagaagtggccgatgcgattaaagatgaactgaatcaatacaaaaaagaccataaagggttcaagtacagctcgactcttgatatggcagagccgattacagagtcggtggatacgatgttaagcaaagcgattttcggcgcgatttttgcggtcgtgatcattctcttattcttaagagatattaaatcaacgatgatttctatcgtttccatcccgctgtcactgctgattgcgcttcttgtgctgaatcagcttgatgtcacattgaacataatgacgctcggtgcgatgacggtcgccatcggacgggtagtcgacgactcgattgtcgtgatcgaaaacatttaccgccgcatgaggctgaaagatgaacctttacgcgggaagcaattggtgcgtgaagcgacgaaagaaatgtttaaaccgatcatgtcatcaacgatcgtaaccattgccgtattcctgccgcttgccatggtcggcggacagatcggcgaactgtttatgccgtttgcattaacaatcgtcttcgcgcttgccgcatcactgttgatttcgatcacactggtgccgatgcttgcgcacagcttattcaaaaaatcgctcacaggcgcgcctgttaaagcgaaagagcataagccgggcagattggccaatttctataaaaaagtgctgcattggtcattaagacataaatggattacatctatcatcgcggttctgatgcttgtcggcagtttgttcctcgtacctctgatcggcgcgagctacctgcctgcgcaagcggacaaaacgatgcagctcacatacacgcctgaaccgggcgaaacgaaaagcgaagctgaaaaagctgcgcaaaaagcggaagatatgctgcttaaacgcaaacatgtcgataccgttcagtattctttaggctcgcaaagtccgctcggcggaagctcaaacggcgcattgttctacgtgaaatacgaggatgacacgcctgattttgacaaagaaaaagacaatgtcttaaaagaaatcaaaaaaacatccagccgcggcgaatggaaatcacaaaatttcagttcgtcaggcaacaacaacgaattaacgtactatgtgtacggagattcagagtctgatattaaaggcacggtcaaagacatcgaaggcatcatgaaaaagcagaaagatctgaaagacgtcaactcaggcctttccagcacttatgatgagtacacgttcgtcgctgaccaggagaaactcagcaagcagggcctgacggcttcgcaaatctcccaagccctgatgtcccaaacgtcacagtctcctttgacaacggtgaaaaaggacggcaaagagcttgatgtgaacatcaaaacagaaaaagaccagtataagagtgtaaaagaattagaggataaaaccatcacatcgcctgcaggccaagaagtaaaaatcggcgatgtggcgaaagtgaaaaacggcacgacatccgataccatttccaaacgcgacggcaaagtgtacgctgacgtaacggcaaccgtcacttctgacaacgtcacgaaggtgtcatcggccgttcaaaagaaagttgacaaactggatcacccggacaatgtatcgattgataccggcggtgtatcagcggatattgctgattcctttacgaaactcggcttagcgatgcttgccgcaatcgccatcgtgtacctcgttcttgtgatcacgttcggcggagcattagcgccgtttgcgattctgttctcgcttccgtttacagtcatcggcgcattagccggactgtatgtatccggagagacgatcagtctgaatgccatgatcggtatgctgatgctgatcggaatcgtcgtcacaaacgcgattgtcttaattgaccgcgtcatccataaagaagcggaaggcttatcgacgagagaagcgctcctggaagccggctctacgagattgcgtccgattctgatgacggcgatcgcgacaatcggcgccctgcttccattggcattgggcttcgaaggcggaagccaggtcatttctaaaggactcggtgtcactgttatcggcggtttaatcagttcgactctgcttacccttctgattgtgccgatcgtatatgaagtattagcgaaattccgtaagaaaaaacctggaacggaagaagagtaagacagcgggccttggctccttaaacggagccggggccttttttcttctggcaattcctgtacatattgttgcgattttctcaagtcatagtataattaaaggttgttagtgttaataatggatcggatactcttaagtaggatgatgagataatgaaacgtgcacgcataatatacaatccgacttcaggacgggagctttttaagaaaaatcttgcccaggtcctgcaaaaatttgaacaagccggttatgaaacctccacccatgccaccacatgcgcgggggatgccaccaacgccgcaaaagaagccgctttgcgggagtttgacctgattatcgcagccggcggagacggaacgattaatgaagtcgtcaacggccttgcaccgttagacaaacgcccgacactcggtatcattccggtcggcacgacaaatgacttcgccagagcgctgggcattccgagagagaatgtactgaatgccgctgataccgtcattaacggcgtggcccgcccgatcgacatcggacaggtgaacggtcagtattttatcaacatcgccggcggaggccgtctgacggagctgacgtatgatgtgccaagcaaactgaaaacgatgctcggccagcttgcttattatttaaagggaatggaaatgctgccttcacttcgaccgacagaagtcgagattgaatatgacggcaagctgtttcaaggcgaaattatgctgtttttagtgacgctgaccaactcggtcggcggattcgagaaactggcccctgattccagcctgaatgacggcatgtttgatttgattattttgaaaaaagccaatctcgcggagtttatcagagtcgcgagcatggcgctcagaggcgatcatattaacgatcagcacattatttacacaaaagcgaaccgtgtgaaagtcaatgtatcagaaaagatgcagctgaacctggacggcgaatacggcggcatgctgccgggcgaattcgtgaacctgtaccggcatattcacgtcatcatgccgaaggagaaagcggaacagctggatgattaatacgcggacaaaatcctaaaacagtattcgttttaggattttgtcatcttttcagcgtgatcggaaacctttgaaggctgacattgaatttgaaggtttgccagcacgctgaaacaaggctattggtaaaactagaggtgattatagatgaaaatgaaacccccgatagaaaaaaatgaatactatgatgtggcatttgaggatttgacgcacgaaggagcgggcgtcgcaaaggttcagggattcccgatcttcgtaccgaacgccctgcctgaggaaaaagcgcaaatcaaagtgacacgcgtcaaaaaaggcttcgctttcggccgcttgattgaactgaaagaagaaagcccgcacagaacggatgccccgtgcccaatctacaaacaatgcggcggctgccagcttcagcacatgacctatgaaggccagctcttgtttaaacagaaacaagtcaaagacgtcttagaacggatcggcaagctggacctgtccaatgtcaccgtgcacccgacgctcggcatggaagacccgtggaactacagaaacaaagcgcaggtgccggtaggagaacgggaaggcggactcgtcgccggattctatcagcaaagaagccatgacatcatcgacatgagcgcctgcctgatccagcaatccaaaaacgacgaagccgttcaagctgtcaaagacatttgcgcctcatacggcgtcaaagcctacaacgaagaacgccacaaaggctggctccgccacatcatggtcagatacggcgtcgtcacaggcgaaatgatgattgtcttcatcacaagaacaagcgatttcccgcacaaagcgaagatcattgaagacatcacagcgcaattcccgcacgtcaaatccatcgtgcagaacatcaacccaaataaaacaaacgtcatctttgggaacgaaacaaacgtcatctggggcgaagaatacatctacgacctcatcggagacgtcaaattcgccatctccgccagatcgttctatcaggttaacccggagcaaacaaaagtgctctacgacaaagcgcttgagtacgcggagctgcaaggggaagaaaccgtcatcgacgcctactgcggcatcggaacgatttctctcttcttagcgaagcaggcgaagaaagtatacggcgtcgaaatcgtgccggaagccatcgaggatgcgaaacgcaacgctgagctgaacggcatcacaaacgcggaattcgcagtcggagaagcggaaaccgtcattccgaaatggtatgaagaaggcattacagccgacaccctcgtcgtcgacccgccaagaaaaggctgcgacgaagccctcctgcggacaattgtagagatgaaaccaaaacgcgtggtgtacgtgtcctgcaatccaggaacgcttgcaagagacctgcgggtgcttgaggatggcgggtatcagacgcttgaagtgcagcctgtggatatgttcccgcatacgaatcatgtggagtgtgtggctgtgctggaaaaatatgaagtgaaaatgagtctttaatatttaaaggctcatttagtttgtaaagagtcagtaacttgttatttagatttaaacctataattcaaaagttagctagttagttacttgatttttgtttataatgtgtatagaaatgtttccaatatagggtaaaaaataaatgattagaatgaagaactgaatgttcatctccactctagttttaaaaaatacatattatttagaaatgaggattatgttggatgagtaatgtggataaagttactcctgcagagcttgtagaaaaagtggatacgaaaattgagcaggtaagaacacgaagtttagatctttcatttaatgagttattagatatgtacaagaatggtgaatttgaaatagcaccagactatcaaagattatttcgttggtctgaagagaaagagtcacgttttattgaatcgttaattttagaaatgcccatacctcctatgtagtggaaaaagaagagggaatatacgaactaatggatggtttacaaagaatatcttcctatcttcatttcagaggggctttagaagttaaagaagatcaggataaaaacttaaggttaaatgggtgcgatattgttactgaattaaatggtcacacttttgacgaattgcccaaggttttgcaaataaagttaaaacgtaattttatacgtgtggaagtaatacggaaaggtagtgatcaaaaacttagatattatatgtttaaacggttaaacactgggggggaattactaagcgaacaagagattagaaactgtacaattcgtttgttagataatagatttaatgattttataattaaaatgagtaaagattcacactttgaaacctgcataaaacacctttcagaagataaaaaggagaaaaaagcagatcaggaatatgtattaaaattctatgcttttaaaaatgatagagaacaatataagaaaaatattactccatttttaactaaatatatggagaaagtttctgatccaactcgagaaacagatgtattttttaactatgatgaagaagaaagactttttagaaaaacatttgctattttagataaggcattaggagagaatgtttttgataaagtaaatcaacataataattttatatcttctttaacaccaactcattttgattcttttacaattgggttacaggaacacattgataatctggattctgaaaacgaaaagcaaatgaatgacttaggtggtttgttaaaagaattaaaaaaagataaagattttctcagtattactgcaagagggggaaaaaatacagtaaagtatctaaatcaacgtatttcacttgtagaacggaaagtcggtgaaatgctaaatggacagtaaaaagattcttgagattagagaacaattagaagaagatcttacatggcgcaaagatgagattagattactgcgtaatcaactttcttatattaatttagatgaagataaaaaacgatatcggaaggccttacttgttatgctttattcccattatgaaggcttttgttacacagcattacagatatatattaaatctataaacgatgaatcgttgaaaagaaaacaagcaaacttccaccttgcgacatgctcattatctaaagagtttgatgcttacgataatattgatcacaaaccacatcattacaaagcaatttttaaaaagcaactaccagaggaaagtaagctacatcgatttgctcgacaacttggtttagttgagaaaataaatgagttttgggaagaatcattgtttattccggatgaagtagtgaatacagaagctaatttatggccgattgttctaaagaagctactctatcgtttaggattaccttatgattattttaaagaacacgaaggtaatataacaatgcttgttaatcgaagaaatggtatctctcatggtagggataaagaaggctttgaggagaaaacatataatgagatccaacaaactgtatttaaaatactagattctgttgtgaggttaataattgaggcattgactcaaaagagttacctcattatttcataaatttgtctttaatctatttgagttatatattttacttagtgtattattaaaacaaaactcgtcaggctattgatacttcaaatcgatagcccatttttattctttatttatttttcactctaaattatattaaaatattctttgattaagaaacataatattctaaagggtaattttgtatttgctttactgtaatatttttcgttttggagatacatgataacataggtataatataaataatgaatttttcttggtaggtgtaacatggggaagaaacataaaactgaaataaggtcggcaaaacgtggacagaatgaacgtaaaggtgtgcatgaatggcatccttattatgccggatattctgaaaactttgttgatgatgtgttgaactatatgggagcaactgaagcctctatagtacttgatccatggattggtagtgggacaacagctattgtttgccaaaggcgaggtattaagtctgtgggtaatgaaatcaacccagtcatggtaatttttacaaaagctaaatcattaaatatattggagtttgatattacttcaattttaatttcaattaaaaatactgtagctgaaaatgatggattattagaagattactatgataatcaggaactacttcaatttctagatatttactattgggaaaggttaaataaactgcgttttgcgatagataaagtttgtcgagaactagaaaaatcaaaggataaagaactagtagattgtttgttagcatttttttatgctgctttatttagaagtttaaggacagtaggtaattttaaaaggggtaaaaaccccacctggctaataaaggaaaattattcaagttcttcgaacaataaaatcaatattttagggatttacgaaaagtttgtaatttcgatgtttaatgatttaagaaatatttactcaaaaaattccctgttgaaagctccattaccggaagtttatttaggagatagtagaaaattgacgttgaaaagaaattcagtagactttattataacatctcccccttacttaacaagaatagactatgcaatagcaaccaaacctgagttattgtttttagggtataaggaaaagagtaaatttgatcttatcagaagagctacaatgggtgctcctgtcatttctgataaatctttaaagaaaaataataactggggtgaatcttgcatgagttttttggaaaaagtggaaaaacacgaaaccaaagctgcaacgagctattatttgccgatatttctacaatactttagagatgcatatgaatcattaagtgaaataaaacgtgtattaaagccaaaaggaaaggcgtgtttagttgtccaatcttcttattttaaagacgtggaagctaaattaggagatatctatgcagaaattggtgacaaactaggtttaagtgcttcaatcataaaaagagaggaaataaggcagcatttagcccatgtaaatactaaatcatctcagtatgtaaaaaataagatctattatgaggacgctgtacttttagagaagcgttaaattactttatgaaattttttttgtgttgaaaccttacgtaagtttatagggatatttaggttatattccaatctatgtttatatatagtaaaagattctaaaatgatttttttagaatctttttttgataagagatttaattttacacgctgttacctaattatttggtccaaaacaacttatcgttggagtgcctttaaatctgagacaatatcaactggtcatttttaaaatgagaaaaatataccaataacgtagtagtcagttctgaaagttggcttttaaatgtctgttggatgtttgcctggtgtcttgaagtgaaagagaaccatggtagagtcatctaatatttctgcataaggatatatttttgtccattcacaaggtatgatgtcatttaatttatcaccaataatctggtacagatcttgcattttcttattttccaatctttcaccttcaatcgtcgagaaatcctagttataaaaaatagcccagcaaagaagtgctgagccattattgatttatagaccgaagtagtttattacaaattctttatcgctctcatcttcaggcaatatccctaaattttgatattcccatatcacttgtcgttgtgttccgtttaagtctgaggcgatgacatcggtgtaatcgtagtcaattgagaatttaccgcttcgttcgagatgtaaagtgaggtttgtccataagtcctcgttgtttgttttaaattcatcccgtaactcttcaaagtaatcatgcaattcatatagaagttcgtcatatatatcttcatcaacattaaaatgttcaggaatatcgtgtgaatatatatattcctgattttgtggagtagtaaagaagaagtaaacttctgaagaatcatctaaaatttcggcataaagagcaaccttctcccactcagaggggataatttcatttatttgctcagcgattttttgatatagtattcccatcttttcagtttccacaatatcagcctcctgcttgattttttattctaacatttttaaatcttttatttccgatcttatatttgaccttaaataaattaggtcttaaagagtctccactataaataggcttaatttcaattgttactaatttaggaggttcttctttaagagcttttgcccactcctgctccatctcataccatttcccgccactcctattaatctgagagttcatcggcacgatgttgtcgaattggcctgagcctttgaattgggtggtggcgattaggtggcctccgtcgtcatctgtcagacggtctggtttatctgcttttgattgcgcatattgatttcgctttgcttctcctaattgtaaatcagcttcaacttttgtaattctaccatagttgtctgtattgtatgtgtagccttcttttgttttgtagatgacattcggcttcaatactttctttctggtccatttcgcaaaatgctcgccttatttgaccgttaccggcggtacatgcggtgccggtgtccgtctgccgcttgcagaagttccgtacggtttcggcagtaccactttggcgaatgcttgcagtgcttcttttaaacttttgattgactgtgttgtaaggcactccttcggcggtgcatggagtggatgatagtgaagaataacctcaagttatagttactttgtttgtgagagaacgcccctccttttgtttatctatagatgtttatagtcttttaggttttacacgcaaacaaaaaaggcctctgaaaaaaagagagccttcttctagtcatcctactttttatcttcttccaagtagtatgaataaccatctaataaaatctctacattatgaaaatgtaattcagaattatgttttattatgattttttcttttatacataggaaactgctccaataaatttaaatgaatagttttttgcgtttatttctttctccctgccgtcatattcaaaattatataaaagaaccgcagcattgatttgatcagggagtgtggtacctactatgtcttcgaaacgaggtaagatgacactatcgtatgaacagccgtcaattagtgcaggtaaattgttacgactattttcatgtgcaactttttctataaaatcttcatctaaatcatcgatatctatatcaaagtcaattaaaaattgggaaggaagaaaatcaccctcatcttcattgtaaactaattcaacatatttacttaatgattcattatcctttatactcccgatccacaatgatacgtaattttgacgttccatataaacctcctattatttaatcctcaatccttttggcagggcttccactccacctttaagtctatagtttgcccaattattcaaccttcggacaaatatattatagtttagagatgaatcaataattcctagcaattcattatgggcagctgtagagcccaatcccccgtgcttaccaacaggatttacgaactcaacttcgtttatggcagttcttaaatctcttatttgttccgctgtaatattccaatgtttaaaggtaggagctcgggaaactaaatgccattcgtgcatgccgccgggtgctcttagttgtctttcaattgctcttctaactcttttatctgcccaaagttcatcaagttgttttgtggttaatgagttgaaccaattattaaattcaccactttttactgtaggaactattgtttttctaggtttctttacattctgggtttttattatctcagtttcttgtaaagctttcgacttctgtccttcaatctctttcttcaaaagcggtgtattcttcacattatgcgtattctcaatatcctggacaattcctgcaaaagctggttgatttccttttgataatgaattggtgaaatctttagttttctggatacctgtcttcacatgttttgcagccgctttttcaccggcttccaagacgttatccactttagctgcacctgttttagcgagcttgcttgatacttttacagctgagccggaacctttgagcccgacaatgctcccgatggcgtaggtgatgtaatgtgatcttgaatacgcatccccgttaaccattttatcattccatgaatccgccaggtttgtccatatgatttttgcgtaggagggtgtgttcaatacagccgatatggttttagcgactttttgttcatcagagagatggtaaaaatcccatgcaccgacagccagatctttgacgccggttatggtgtctttcccgacatcataaaggccgacgcctattcctttaacgatatcccaagccgtttctccgacttcttctagctgttttgcctgttcgagctgcatcacatattccacctgagcaggttcaaggttttcatagccgatcttcttcgctatttccaaatactcatccggatcggtgacaccatcggccagctttttctttaggtccttaatttcacgctctttcgcttcttcctttttaatcgtcaaataagcatccgaatgtcttgcgatatcgcctttcttcttatggatgtcgctttcacggtacgcgttggcattgtagtgaagcggcgtggcgttttttcctttgcctgtagcgttttggagctgctggaaatctgcttggataaaatgttcatttgcttcggtttctgcgtattctttcgttagatcgtgatcaagcttgccgagcttatgtatcgtttcgcttctttttttgtcagctgaagaaagcttctgatctgtgctttccgttgaaaatagatcaagcgagatgatgtcttcgatctctccgaggatggagcgcatgtcctttttctgctcttcgataatcgcctttgatttactgagggcgtgggtgagctcatgctccagaaatgattcctccacatgcgaattagaaagtccggcatcttcgaccttaccgggaaggcttgtgagaaatgcggttttcatatcgatcagatcaagccagctgtctgtgacgccggcgtggtccttgaaaaaagctttgatgttattggcgccccggccagagaaatcattgtcaccaaggtcagccatgccttgaaatgctttttttagattgaccatctggccgcgcagttctttgtattcacccgcgcgctgtttggcagctgtcaacaagctgtttgcttcaaaaactttcatgaccatatcctttcattcggggttattttttcagtttatagagggaaagattaagaaacttatcagagactgtgcaaacataggaatagggtttccctgaatctataaagcctcaatattcttttcgattttttgaatgacttgtccgagccatagtattggggatagttcgtaactattgatatctacaccatcagcagattcttctataaaaacgtttttttgttcttctgagtaatcgctatttataaacgctttgagtgcttctacatcgttttcttgttcttttttaggtatctctgctaagtattcttcaagagctgactcagaagtgtctatatcttgatggaaaatccctcctaaaaattgaaatgcaggttcagaatatttgtttcaatcattgatctcacctcttgggtaggctggttgcttcgaaaactttcatgaccatatcctttcttttgttcgatatcaaaattttaccacgtaagtcaggatatatcgtgtaggaaataggtaataagaataaaatgaatcttttggcttgcgacttccttcctgtatgaagggaggctttttatgttttgtacaataaccctcaaattcggcttactgcgctccggtgattttaagcgtgcctgttttttctaatgtcttacactcgaaacaacccaaccgctgaggtataatagaagcagagtatttatcatacagattcaattcgtgaaagagagtggaacaaaatgggccgtaagtggaacaatattaaagaaaagaaagcatcaaaggacgcaaatacgagccggatttacgcgaagttcggccgtgagatttatgtggcggcaaaacaaggcgagccagatccggaatcgaaccaggcgttaaaagtggtgcttgagcgtgcgaagacgtacagtgtgccgaaaaatattattgagcgtgcgattgaaaaggcgaaaggcggcgcggaggagaactttgacgagttgcgttacgaaggtttcgggccgaacggttcaatgatcatcgttgatgcgttaacgaataatgtaaaccgcacggcgcctgaagtgcgcgccgcattcgggaaaaacggcggaaatatgggtgtgagcgggtctgtcgcttacatgttcgatgcgactgccgttatcggcgttgaaggcaagacggcggatgaagcgctggaattgctgatggaagctgatgtggacgtgcgcgatattttagaagaggatgacagtgtgatcgtatatgccgagcctgaccaattccatgccgtgcaggaggcattcaaaaatgccggcgttgaagagttcacggttgcggagctgacgatgcttgcgcaaaatgaagtcgagcttccggaagatgcgaaagctcaatttgaaaagctgctcgatgtgctggaagacctcgaagacgtacagcaggtttatcacaatgtagatttaggcgaataaagacaaaaaggccggggcggcatatgttccggcctttttattttgcttaagcggtcggcctgtatcgtatttttctccgtaagcaattattgattatttcgccaaaactgggcggatgcccatacgtttccttccggatgtcataaactggactgtaacctatgtgaaggagcgataaatcatgaatgaaagaagaccgatttacggcggcggctacggcggcggctatggcggctacggaggctacggaggcttcggaggatatccgggatacggttacggcggaggctacggatacccgggatacggttacggcggttttggcggctacggaggctacggaggcttcgggggatatccgggatacggttttggcggctatggcggaggctacggcggctacccgttccatcatcatcatcgggacagccaatatatctgaccattcgggaaaaagcactcttggaacagcaagagtgtttttttgtgaccgtttctaagcgctggcttttttattatcttacagggcataaatgccgatacggattcatacctattaaggtcatgtgtttaggaaaggaggatcgtaatgaaagaaaatcagccgtttacaccggtcaaatcctataaacccttccacagccggtttgatccctgcccgccgatcgggagaaaatactacagaacgccgccgcatctttatatgcggtttcagccgtatcacttggagcagttttctccgatggaggcattgagaaaagggaccctttggaaggatctttacgatttctatgataatccttatcgggggggaatcgattatggcgaaaaagattgatgatgaatattatcggctgctggagcaaatccaggcggcggactttgtcttggtggagctgacgctttatctggatacgcatccccatgaccgtctcgcgcttcagcagtttcatgaatattcccggtactcaagacagctgagaaagcggtttgagcctgagtacggaccgcttctgcaattcggcgtgagtcaggtcggcgctcaatgggactggggccgcggtccttggccatggcaagtataaggagggatctgtaaatgtgggtatatgaaaaaaagctgcagtatccggttaaagtcagtacatgcaacccgatgctggctaagtttctcattgaacaatacggcggggcggacggcgaattggccgcagcgctccggtacttaaaccagcgctacacgattcctgacaaggtgatcggcctgctgacggatatcggcacggaggagtttgcgcatttagaaatgattgcgacgatgatttataagctgacaaaagatgcgaccccggagcagctgcgtgatgcagggctcagtgatcattacgtcaaccatgacagcgcgctgttttatcacaatgcggccggagttccgttcacagcgtcttacatacaggcgaagggagatccgatcgctgatttatatgaggatattgcggctgaagaaaaggcgagagcgacgtatcaatggattattgatatttccgatgatcctgacctgaatgattcactccgttttctgcgtgagcgtgaaatcgtccactctatgcgtttcagggaagcggttgagattttaaaagaagaacgtgataagaagaaaattttttaaacggccctcaaacatgacggctgtttttttcctttctgcgtttggtctataatgaaggtgtcgaatattctgattacaggaggcttttatgacaccatttacgatcacggaggagaaggcgggggcattccgggtcacctccgcccggaaagatgatgcaaaagaggtcatggatctgctcgtgcaagcggcagaatggcttcgagataaagggtcgaaccagtggagcggccttctgcaaggggaagatacccacaatatgcgggaggcgatcgcccaagggtatgtttttttattcaggcagaatgaagagctggccggcgtcgtcatgctgcttctcgaagcaagcgggtgggacagacgtctttggggcgatgagggacatgaggagtccgtatatctccaccggctggcgattaacaggcggtttgcaggggcggggctcggccggacaatcatgacttgggcggagacgggtgtgtcttgtccgggaaaaacgaaaatccggctcgattgcgtgtccgaaaacaaggcgcttcagtcgttttacagcggaatggggtacgaatcaaaaggacccgcgccgggttatcatttgtttgaaaaaaaggtgagcaaataaaaagctactcatgacggaggtgcaaaagacatggggtttttttttctgatctgtctggccgcattttgtcttaactttgccgtatcggctgtgctccgcaagaaatggccgaaaaagatgtggcctgagtgccttttggcggtgctgggcctgactgctttcggtacggttgtttacagcattttcggtgtcggcggctgggaaggaatgggcttggggcttgccgcgatgtttgcgggttccggagcggccgccggttatgccgctgaggtgtgcttacgggtcgtcagatcgaatcaaaaacagtaagcagaagtgaaaaaacgcggccacggctgcgtttttttgtgtgttgccggccgctgtatagaaaacaggcgaatgtccataatggtaatgacttttaagaagaaggtgcgaatatgggacatttacttacagtggcttgggagttagtatgcggtttgggtattttatttgtgattttaaaattgcttggaaaaactcaattctcgcaaattacgccgtttgattttatttccgcgctcatcctcggcgaactggtcggaaatgcggtgtatgataaaggcgtcaggatttttgaaatcatttttgcctctctgttatgggggggtttaatttatctcatcgaactgattacgcagaaagtaaaaagctccagaaagctgttggaaggcgagccgagtattatcatccataaaggaaaactgaaatatggtgtgctgaaaaagaataagctggacattaatcaattgcaaagccttctcagacaggcgaattgcttttccatacaggaagcggagtacgcgattttagaaacaaacgggatggtcagcgtcctgccgaaatttcaatatgacacgacgaaaaacggcgacatgcaaataaagccgaagcaggtctctttgccggtcacgctgattattgacggcgaagtgctgtatgaaaatctgaaagaagccgggctggaagaaaagcagctgaatcaggagctgaaaaagctgaacatcaaaaaaacggaggacgtgctgtatgcggaatggaagcccgataaaccgctgtttgtcctgccgtatgaggagaaaaaataaaaagagcattgccctggggcaaatgctctttattatttttcgtgtacgcctgttttaacggctctgacatgatacataccgacatccgtcccaagcatataatcaggtttcggcttgccttggtttgctttgtgggccgcgatgtggtcttcgcttttttcccattgtttccaatggtcttctgactcccagcggattaacacgacgacttcttcatcaccgcggcggacttttttttccaggaccgttacgtctatcaaaccttcctgcttttcaatcacgccttctgaactgaagcgttcgattactttgtcggcatgtccttcttttacggtcatttttctgatttgcacgaacatctggcagctctccaatccttttcacgctttatccaacattttaaatgaaaatgattctcaaagtcaattaagatgcctgacggattacgatttcaggagaaagacatgaccatcctcatctttaaattgcacgaagctgccccattccatttgtttcggttcatctaaaaaggtgataccgttctttttcatctgttcgtatgcggcaaagacatcttcacactcaaatacgatagaagccttcatatgctcggctcctttcatcattgatttcggataaatcaccaaatgagtggcggcccctttgggcgctacctcaagccagaaggcgcccgggcccatcggatgctcggcgacagtttcaaaccccgctttttccgtccagaatgttttcgctttttgctgatcatcagtgtatacggcgactgttgcgatttttttgatcatcatactgacctcctgtttcatttcttttatagtgtatcctcctgccgaaaaaagcaatcaacagctttaatgtgcaggtttttttaatttctctagtgcgatcggcgattccgatttataatttagacaaaagtacatattcttgaaagaggagacggcagtgaacaaagaccaattacttcatgattatattattacacattcggcagagctgacggaaaaatggctcaagctgagacggaagctgagagggcgtttttattctgcggatcaattaagtgaggaaatgaaacggctgctgatcgagcagcatacctttacaaacacggtcatcgcaagcgcttttttggaggatccggccgtttttcagcataacaaagaaaaatgggccgcacaggtagcgaaaagcagagtggagcaagacgcggaggttcatgaggtcgttgaggcgatcggcaattcaagaaccgtcttttgggaggcggtcacccgttttatggatgagcatcaggacatcgtaacaaacgaggatgcccgccgctggaatcaccttgtcaacggctcgtttgatcagctgatgacggattttactgaacagtttcagaaattaatgatcgcgaggctgtcatctcagcaggagcttatttccgaattgagctgtccggttattttgatcgcggatacgatcggcactctgccgctcatcggatcgattgatacgagacgggcacgcgtgattttggagtcggtgccggaaaactgtgtcgccaaacggatcacaaaccttgtgattgatctgtccggtgtgcccattgtcgatacgatggtggcgcagcaattgtatatgctgtcgaaaacgttatttctcctcggcatcagaaccgtgttttccggcattcggcctgatgtggcacagacttctatccaattggggcttgatttttcagagtatcaaacttacggctccctggagcaggcgctcgccagcatgggtgtcacatgtgtgatcgaggaagcaaaagcatagaaaaaagggtgctccgtccagaggcggggcgctttttttgtcagcggaaaacaatgtaaatatgtcggaacgtgaagattgcgttcttaaaaacagctatatgacgccttgggagtcgatttcgggatgacacggtttatatcaaagcgaaggaagtgaaagttttcgcaaagaaaacatatccaaaaattgtgtaaatgttattgatttctgaatgaaaacataatagtataattatatatttcttatcagaatagtatgaattaaaacactcattgtcaaaagacgaacggccagacataaagggggagcatgatgacgtccaaaggaaacgtagatccgcatgtgatcgaaaagattatcagcgcgctggaaacgctcgatttcgggacagttcagattacggttcataattcccaagtgacacaaattgataaggtggagaaatatcgattttccctgaagagcaaagaagtaaaacaatcttaaaaaacagccaatgacaggaggcggtacatatgaagcattcaactgttcctttccgggagagccggtatctgcacctgcccgaagtgcgctttctgcattggtgcacgaagcaatacggtattaacaaaggcgtgctcaatacaattgacggctggttttatgatgcgggcgtcattccgattcccgtcaggcgtctttatgtgctggcatttctcgatttcgcgaaaacgccggggcagaaggggaagatccgattcgggcacggcggcttgacgaaaaaactgcatgatttcatggatatgcaggaatgcgcagcaaaacgtcaggcctgacatccttaaaatcttcttaaaatcatacaaatttctcccattttatttataatagacctatcaagatcatttttttgggaggacttttgacatgcaaactgctgcttatgagagcaaacaatctattatgcagcgcattataacggtatttgtgtttacactgttagttgcgacaatcggcctgtatacgggccagttcattccgccggcattgatgctgccgctgtcggtcttagaggtcgtcatgatcatcgccgcattttggctgcgccgaaaaaaagccgtcggatatgtgtttgtcttttcattcgctttcatttccggaatgacgctgtttccgattatcagccattatgcgtccgcagcgggggcctatgtcgtattggaggcattcggttcatcgtttgtgatttttgcggtgctcggcacgatcggcgctaagacgaaaaaggacttgtcgtttttatggtccttcttgcttgtcgctgtcatcgcgcttctcgcagtggggatctttaatattttcagcccgctgaattccgccgccatgatggcgtattccgtcatcggaacgattgtgttttcaatgtacatcttatacgatctgaaccagatcaagcaccgagacatcacggctgacctgattcctttgatggcattgacgctttatatcgactttattaacctgtttatcaacctgctacggtttttcggaattttaaacagtgatgattaaccgcgcgaaaaaggcgccctgctgagaggggcgcctttttatgttctgccgccggaaaacagcagaagcttatcaaataatacttcaagcatttttgtcaattccgctttttgttcagcggtgaagctttccatgactcctgaaatattggagaagtggccgggaagaaacagcatcagcttttcttttccttcttttgtgagttcgatgctgatttttcgtctgtcgccggtatgccggctgcggtttacaaagccatcccgtgcgagtccgtcgatcaatccggtgatggtcgctttggtgacattggattttttcgccagatctgtcggactcaggctgtggccgggtgcgtcaaacagaaacattaaaattttgaatttcccttcggacaatccgtgacttgagaaataatgctccatgacctgattcatttttttagacatatcaaataacgtcaaaaatgttttcaatgattcagcatccatatcggcgtaaatctcagcgcgttcggcaatctgcgagtaatccggcaaatgtctcaactccatttttgtaagcctccgtaccattttagtgattcaaagtataagcttgccggattcaaaaggcaacctataaagattgacagtttttcagcctatatagtaaggtggctaatagttaatgaataataaataaatagagaaggcggtatcgtgatgaaccatgaagtgaaaaagatcatcatagcgggcggagggatcggcggcctgtccgcagcgatttctctcggcagagcgggttttgaagtgaccctttgcgaggcggcgtccggcatgcgaaaaagcggagcgggcattctccagcctcaaaatgcgctgcgggtgctgcgggaaatcggtgtgtatgatgaatgctgccaacacggctttcaaacggaatggctgaagcaccatgatgaaaacggaacgctgcagtttaaagtgagtgaggcgtttttagatgattcattgccggggcggaataatatattgcggcaaacgttaaacgatatcctcaaaaagcatgctgaagcggcgggggtcaagattctgctcggtaaaaaagtcgtgtcttacgaagaaacggcagatgaaataacggtgcattgtgcagacggaaccatgatgacggctgacattctcgccggctttgacggcatccgctccgctgtccgcaatcaaatgctgcaaagagaagtgaaaacagagtatctcggcatgggagcgcacagattttacatttcttttcccgagccggtttttcatgattcgacactgatgtataaaaaagggcagacgcaggtcggagtcgtgccgctctctgaaaaaacaggatacgtatttatcatccggccgtatgacgctgacttcagggatgacgaggacacgcgttttgaacgggtgaaagacttgctgcgcggaattccgggagtaaagtttgtgacagagaatatgtcaaaggaatatcccgttttgtttcataagattgagcagatggcggtcaaagaaccgtggcacagaggccgcgtcgttctgggcggggatgccgtccatgcaggagcgccgacattggcgcagggagcggcgatggcgattgaagacgcgattgtgcttagtgaagaactgcgaaaacacgaaaaccatgaaactgcatgtcaagtatacttcgaaagacgggcggagcgggctttacaggtgcagaatctctcatctgaaatcgtccgccgcgagataaagggaacgcccggcgtccaagacatcataagggaatgctatcgattgctcaaagagccttattaaataaagcaagtccagaacatggcgtctggacttttgtcagtcttgttcagatttattccgtatccgttcaatcacctcatgcagcccctcaggcttgtgaaactccaccggcgaactgcctttttcaaacgagatcgtctccgcctcaatgagcgcgacatagcgcccgttcacttttgcgagatggatggattcgccgaaatcagccagtaatcctttaatctctgtttctcctactttcattttcagctcggcttccggcgtgtgttcaatgatctgcgcggatgcctcgatgacttgatgggtgtcgaggcgctcctgaatttcccgcttttcactcgcttcccaaatttcaatgtcgtgctcaaactgctgaagctcttcgctgttttcttcaagagtttcatacacgtgctcctgcaccatgttcatgacttggtttttcatgatttccggcatcgattcgccgtattcgacaaatttgagaaaatcttcgaaataacgggcgtgcgaggcctggtggattttcagctcatgctcttccgtcatgccttcttccggcatatacggatattgaatgcttttcatgttttttgtcgtgatggccatttcgacctttttaatgagagacgaggcgtctgagatgcgggcgaccttcggctcgaaatcgcatttcatcataaagacgaatttgtcttcaaaatacttgcgcggaacggccgatgccacgataaaaacaccgccgcgcacggcgctcgtgtcaaggtaagtgcggacgaactgctcgcttgcttcgataaatgcttccttcgtatccgcaagtctggcgcggttgaaaaggttgtaattcggatttgaatcaagctcatggcccggctccatgataaaatggccgatttttgttgggacctgctcggattgcggatgccgttcggctttccgtttgacgattttcttcaattccccgtcaagaaaatccttcagctcgctttcttcaaattcttccgtgtcaagcgtctggaaatgtttgaactgtttgtttgcctgttcgtcttttccttccacttgaatgacataaaacgataaaaacttgatttcaaaatccatatgtgaactcaccttatttctgtatttaacaagcctctccagtatagaaaaaaccgttatcgatcgtcaatccgatgattgatccgtgacggcggataatcggccggtgaaaagggcaatgtagttggaaggaacgcatcaatgtgttagaaagggtgttattcatgaaggaaacaggtccgattccgcagccgaagacattcggcccgctcggcaatcttcctttgcttgataaagacaagcctacaatgtcgctgatcaaactggcaaacgagcaggggcctatttttcagctgcataccccggcgggcgccattatcgtcgtgtccggccatgaactggtgaaagaggtttgtgatgaagaacggttcgataaaagcattgaaggagctttggagaaagtccgggcgttttccggtgacgggctgtttacaagctggacgcatgagcctaactggcgaaaggcgcatcatattctgatgccgaccttcagccagcgcgcgatgaaagattaccattcgatgatgactgatatcgcggtgcagctgattcaaaaatgggctaggctgaacccggatgaggccgttgatgtgcctgctgatatgacccgcctgacgctcgatacgatcgggctttgcggctttaactatcggtttaacagctattacagggaaacgcctcatccgtttatcaacagcatggtgcgcgcccttgatgaagcgatgcaccaaatgcagcgccttgatgttcaggataagcttatgatcaggacgaaacgccaatttcatcatgacattcaggcgatgttttcgttagtagacagtattatcgcagagcgccggtcaggcggccgggatgaaaaggatctgctggccagaatgctgaatgtggaagacccggaaacgggcgaaaaacttgatgatgaaaatatccggtttcaaatcatcacgtttttaattgccggccatgaaacgacaagcggcctgctttcctttgccatctactttctgctgaaacatccccgtgttttggaaaaagcctatgaagaagccgatcgggttttgaccgatcccgttccttcatataaacaagtgctggatctgacttatatccgaatgattttgcaggagtcattgcgcttatggccgaccgcgcctgcgttcagcctttatgcgaaagaggatacggtgatcggcgggaaatatccgatcacgccgaaagacagaatttccgtcttaattccccagcttcaccgtgataaagacgcgtggggagacaatgcggaggaattttatccggagcggtttgaacatcctgatcaagtgcctcaccatgcgtataagccgttcggaaacggtcagagggcgtgtatcggtatgcagttcgccctgcatgaagcaactcttgttctggggatgattctgcagcattttacctttatcgatcacaccgattatgagctcgatattaaacagacactaacgatcaagcccggcgactttcatatccgggtgcggccgagaaacaaaggagccgttgcggctgctctcccggcggctgaaaaagcggcggaagacgtcgaaaaagaaaaacgggaaacaaaaggcgcatccattatcgggcttgataaccgaccgcttctgattctgtacggatcagatacgggaaccgcagaaggcgtggcgcgggagcttgccgatactgccgggatgcacggcgtccggactgaaacggcgcctttaaatgaccggatcggaaaactgccgaaagaaggagctctcttgatcattacgtcctcttataacggaaagcctccgagcaacgcgggacaattcgttcaatggcttgaagaagtcaaacccggggagctggaaggcgtccggtatgccgtcttcggctgcggtgatcataactgggcggcgacatatcaggctgtaccgaggcttattgatgagaagcttgccgaaaaaggggcggaacgcttttcctcccgaggcgagggggacgtcagcggcgattttgaaggaaagcttgatgaatggaaaaaaagcatgtggacggacgccatgaaggcattcggtctcaagctgaatgaaaatgccgaaaaagagcgaagtgcgctgggccttcaatttgtcagcgggcttggcgggtctccgttggcacagacgtatgaagcggtttacgcatccgttgcggaaaacagggaacttcaggcgccggaaagcggccggagcacaaggcatatcgaaatcactctgccgaaagaggctgcctatcatgaaggggatcatctcggcgtgctgccggtaaacagcaaagagcaggtcagccgtgttctccgccggttcaatctgaacgggaatgatcaagtgctgctgacggccagcggacagagcgcggctcatctcccgctcgatcggccggtcaggctgcatgatcttctgagcagctgtgtcgaattgcaggaagcggcatcaagggctcaaatccgggaaatggctgcttatacggtctgcccgccgcacaaacgggaattggaagattttcttgaggaggggttctatcaggagcaaatcttaacatcgcgcgtctcgatgctcgatctccttgaaaaatatgaagcgtgtgaacttccgtttgagcgatttctggagcttttgcgcccgttgaagccgcggtattattcgatttcaagttcgccccggaaacatcccgggcaggcttcaattaccgtcggcgtcgttcgcggccccgcccggagcggtttgggggagtatcgcggtgtcgcttcgaattatttagcggaccgcggccctgaggatggaatcgtgatgtttgtccgcactccggaaacacgattccggctgccggaagatccggaaaaaccgattattatggtcggtcccggcacaggagtcgccccgttccgcggatttctgcaagctcgggcagcgttaaaaaaagaaggaaaagagctgggggaggctcatctgtatttcggatgcagaaacgattatgattttatttaccgtgatgagcttgaagcttatgaaaaagacggaatcgtgacgcttcatacggctttctcccgcaaagaaggcgtaccgaaaacgtatgtgcagcacttaatggcgaaagacgccggtgctttaatttccatcctcggccggggagggcacctctacgtatgcggcgacggcagcaaaatggcgcccgatgtagaggcaacgctgcaaaaagcgtatcagtcggtccacgaaacagacgaacggcaagcgcaagaatggcttttggacctccagacaaaaggcatttacgcaaaagatgtttgggcggggatttgagcgatttgatgaaaaggactggatgactccagtcctttttttacatcagccaaaaaaaccttcaagtttttcagcccctttgcatacaataacttcagcccgcctgttgggcggctgcctttgatattcatttttcgtttttagaagtttgtgttattcttatatttggtatctcctattttcagacccggtctgatacggtaccttttaatgccagaaaaaaatgtgaaacgaagaacggatatcctgcgtctaatggctggcgggataagatgttcaatgggcatgacacgaatgataaatatatcgtttttttaaatggtgtgtttatggggctgtgtgatgctttcgttttgctcggaaagcaggaattgaagcaaaaagtaagaatacagatttaaagtgtttaggaaagtagaggttgccatgaagaaattattttcttacagacttagtttttttgtactggctattattttgttttgggccaaaacgtatttagcctatcatgctgaattcaaccttggggtgaagggtccgacgcagcagtttctgcttgtgatcaatccgttctcaagcgccattttctttttaggactggcattgtttgcgaaaggccgcaaatcagcgattatcatggtgattattgatttcatcatgacgtttattttgtatgcaaatatcctattctatcgattcttcgatgatttcttgacattcccgaacttaaagcaatccggtaatgtgggaaatatgggagacggcatcttcagcattatgtccggccatgatattttatactttgttgatattattattttaatcgcacttctggtgtggagacgtgagctgaaggaattcaagctgaaaaaacggtatacgtcattaattatcgtgacgggtattgttttgttcttcgtgaacctggcgattgccgaagaggaccgcccggagctgctgacaagaacgtttgaccgcaattacattgtaaaatacttaggcctttataattacacgatttatgacggcgtacagacggcgcagacggaatcccagcgggcatatgccagcagcgatgacctgacgagcgttgaaaactacacatcgtcgcattatgcgaagccgaacgccgagtatttcggcaaggccaaaggcaaaaacattattaagattcacttggaaagtttccaatcgtttttgatcaactacaaacttgacggaaaagaagtcacgccgttcctgaataaactcgcccgcggcggagaggacatgacgtactttgataactttttccaccaaacgggccaaggtaaaacatctgacgccgagctgatgatggataacagtctgttcggactgcctgaagggtcagccttcgtgacaaaaggggaaaacacgtatcaatcgcttcctgccatccttgaccaaagtgagggctatacaagcgccgttttacacggtgactacaaatcattctggaaccgtgaccagatttacaaacatatcggctacgataaattctttgacgccagcacatacgatatgtctgatgacaaccttgtcaatatgggactgaaggataaaccattcttcaaagaatccattccgaagcttcaatctctgaaacagccgttctacgcgcatttgctgacgctgacgaaccattatccgtttacgcttgatgaaaaagacgcaacgatcgaaaaagcgaaaacgggcgacgcgactgtggatgactatttccagacggcgcgttatctcgacgaggcgcttgaacagttctttaaagatctgaagtcatccggtttatatgacaactcggtgattatgctttacggagaccactacggaatctctgaaaaccataaccgcgcgatgaaagaaattctcggcaaagaaattacgccttatcaaaacgcgcagaatcagcgtgtgccgcttatgcttcgcatccccggcaaaaaaggcggggtgaaccatacgtacggcggtgaaatggacgttgtgccgacgatccttcacttggaaggcatcgattctaagaaatatattaatttcggcaccgatctcttctcgaaagaccatgatgatacggtgacgttccgtaacggagattacgtcacgccgaaatatacttccatctccaatgtcgtatacgatacgaagacaggaaaagaactgaaaggcaatcaggaaacgaaaaacctgaaagccagagtcacagagcagctgaagctgtctgacagcgtgatgtacaaagacttgctcagattccacaaattgagcgactttacgccggttgatccgtctaaatatcattacggcaaagaaaagctgaatcaggataataaataatagaaagagccttacggaatttccgtgaggctcttttttttttgtgtatcttcaccaatctgaaaaaagagagagcttttggtcacaaagggcgccaatctctcatatcttacagtagattttgaaaccggtgatagagaatcggacaaattatcgggttggtttctcttatacgggcggtttcgaatccaatattcacagagaagaggggtagagatgaaagcagtcattctctgcggcggaaaaggaacgagaatgagcgaaatcaccaatgaacgtcccaaaccgctcgccatgataggcggcaaaccgattctatggcatattatgaaactctatcaatactatggcgtgaacgaatttatcctgcttcttggtttcaaaggagagatgattaaggaatatttcttagattatgactggaagaatcacagcatgacgctggacagctctaccggagaagtacggatattgggaaaatccgagccgtggaaaatcacttttttagacacgggggaacacacgcagacagcggggcggcttttacaggcaaaggacatcatcggtgatgaaacctttcttatgacgtacggggacggactggccaacatcaacctgtttcatctgatcagctatcatcaatcaaaaggggcagcggtgaccgtcaccggtatagaaaagtcctcgcaattcggaacgttgacggttgaagacggcatggcgaaaagcttttctgaaaaaacctcgagtgacggcatcatcaacggcggatttttcgtactcagcccgaaggtatttgagtatctgccgaaagacagggatgtcatgtttgaagaagaaccgctgaaagagctggcgaaggacggcgaattggcggtataccggcattacggtttctggacggcgatcgatacgtataaaaacctgctggaaatcaacaagatgtgggaccggggacaacatgtatggaaggtatggtgattaaatttgagtttctggaaaaataaaaatgtgtttgtgacgggatgtacaggtcttttaggaagctgcttggtgaaggaactgatcgatcagggggccaatgtgacgggacttgtccgtgacactgtgcccaagtcgaacctgtatcagggagaacaagtgaagcaaatgaatatcgtgcagggtgcgcttgaagatctggatgtgattgagcgggcgctgggcgaatatgaaattgacacggtctttcatttagccgctcaggcgatcgtcggcgtcgcaaaccgcaatccgatttccacatttgaagccaatattcttggcacatggaacatccttgaagcgtgccgcaggcatccgctcatcaagcgggtgatcgtcgcgtccagtgataaagcgtacggcgaccagccgacactgccgtacgatgaaaacatgcctcttcagggcaaacatccgtatgacgtatcaaaaagctgtgccgatttgttaagccacacatattttaatacgtacggacttccggtctgtattacgcgctgcggcaacttgtacggcggcggagatttgaactttaaccggattattccgcagacgattcagctcgtgctgaacggtgaagcgccggaaatccgcagcgacggcacatttatccgtgattatttttacatcgaggatgcggtcgaggcataccttttgctggcggaaaagatggaggagctcaatcttgcgggagaagcgttcaacttcagcaatgagattcagctgacggtgctggagcttgtagaaaaaattcttaaggccatggacagtgacctcaagccgaaagtgctcaaccagggaagccatgaaatcaagcaccaatatttatcggcggaaaaggcgaggatgcttctgaattggacacccgcacataccattgatgaaggattggaaaaaacgatcgaatggtataaagccttttttcaaaagtaacagaaacagaggtgagagaaagacgtgacaagcgcatattgcacagttttatcaaaaggaaggctgtatcaggctatcgctttgttcggctcattgaaagcggttcaggcggacgcccccatttttactttgtgtatggaccaagacacctatgacgtgcttcaggcaatgcggcaggataatgtcaccttgattcaggtgtccgcactggaaaatgaggagctccttgaactgaagcggacgagggatcagagcgaatactgctggacggtgaagccggtatttctcgaattcgtgctggacggacatccggaattagagcgtgtcacgtacattgatgccgatttgtttttcttcgctgatccgcgcgcgatttttgacaatcagccggattgttcggtgcttctgtcacggggcgatatcgtcattccctcatttggaaaacaggaaatcgacatgctgcagcgtcttttaggccggtataattccggttttctcagcttcaaaaccgacagtgccggtacagattgtctcagatggtggaaagaacgctgcctggaagaatgcaaaaatgcgccgggcgaaggaaaattcggagatcaaggctacttggattacatgtccggcctgttcccgaatgtgtgtgacatcaccacgcccggcgtgaatatcggccattggaattacggccgccacacgttttcatggaaggacgggcgtcttgtgctcgaagacggaagtccgctgattttctatcatttcagcggataccggatcgtcacagccggcgacattcggcagattcatgagacggaccggaccgacctgccgtttgtccatcagctttatcaggacattctgaagcgggtgatcgggacggtcagcgccgtctgcccggagttcagcggctttgcatctgaggatgataacaaataaatgatcatatacaggaagtgaacgaaaagtgaaggcaagcgtcattgttcccgcatataattccaaggagcggctttataacagcctgctgtccctgaatgaacaggaatgcacagagccgttcgaagtgattgtggctgacaacggttcggaagacggaaccttatccatgcttgaatcattcagcgcgaattttccgctgatttttgtgagaattaaagaaaacagagggatcgcttacggacggaatcaggcggtccgcaatgccagaggcgatattttgatcttccatgacagcgacatgcttgccgaaaaggatttggtggcgaagcatatcaaggctcatgagaaccgggacgatcttgtcgtatgcggtatgttctggaagcggatttacagcttttattatgaccgttttgaaaaagagcataaagagaaactcgccgaactgtatgaagagctgccgggcgataaagagccgctccttgatgaaagtgatatcagagacggaagttttcttgaccaatgctttgatttagataccgactttatccgtgtgctgaaaagtattttggaaaaatacggagatgatttgaacggctaccgtctgccgtggcgttttttcattacgaacaattcgtcagtcaagagacagcacgtggcagatctcgggctgtttgatgaaggcattgtcagatacggctttgaagattatgatctcggcatcaggcttcatcagtcgggaatgagatttcagctgcggcgcgatatcatgagcgtccatcaggagcatccgagcaactgcgcttccgttgatgatatcagggcgaatatcgcgtacatgtgcgacaagtacaatgacattcattcgcttgacgtgcacctcgcgtttaacggcccgtttgacgcggagttaaccaacagcatgatggcagacatcgaagtgctgcttgattatgagaaatatgaaagcctgctgcacatttttctcgagctgctgcacgcggttaaagaccgcaaccttgacccggactggaagacgaaaagcccgcggatcacggcgaacagcttccagctgccggaggtcggaaagcttttggcaaaagcggaaaaaaagctgggcgtcacgcactttgcaagggcgttcaaagcgctgactgctgatttactgcatgtggatcttaaataaattggatgtgatatggtgagtaaatatcatttttcaaccattgtttccagaacgcatatctttaaactgatgccgatgattcattctctccatgaacattgccgggattttcatctgtatgtgctgtgtgtcgatcagaaagcgtacgaactgcttcagcaggtgccgtgggaacatgtcacggcggttcagctccatgaaatggaggacccggagctgcttgaagcaaagggcggccggacgtttcatgaatattgctggacgctgaaaccggcatttctgttccatgtgatgacggagtatgatgaagccgaatattttgcccacttggacaccgatctctttttcttctcagatgcgggtgagctgtttgcggaaaagccggatgcttccctttttctgacggatcactgcaattcagaacggtttgcgtcttattacaagctgacggggcagtacaacaccgggtttgtcggcgcgcggaataccggggaagcgtatcgggcggtctggcagtggagacaggattgcatctcctattgtacggtggagatgaatgaagaaaaaaagacatacggtgaccaaaggtatgttgaaaagtggcccgcgcagtttgaagacgttcatgtcacggagtcgatcggcgcgaatgcggcgctgtggaatattgagcaatatgacgtcagcctgcgcggcggggctgtatatgtcaatgacaccccgctgattttttatcatttttcaggctttacgctcgtcacggagaacgaattcaatctgtgctggtactatcacattgatgacgaggcgacagtcaatatgatttacgtgccgtacatcaaaaacgtaaaaaaatggattgatgaaattcaaaaagcgtttcctgatttcagagacgggtttattccgaaatacgcggttcctgatactcatttttatacggttgaaacataaaatccctgccttttcggcagggattgtttttatgaatgccattcttttaatgttttgtcgctcggcaggacaaaggcgagcagacctaaaacgggcagaaaggcgacggctgtcatggtcggcgtcaatcccgctgaatcaataagagctccgagcgcaacggctccgatcgcgcccattccgaaggcgagcccgaccgtaagccctgacatcgttccgattttgcctggaacaagctcctgcgcgtagacaacagtcacggagaagctggacatcagaacaacaccgatcagcgccagtacgccataggcgatgacaggtcccgcaaacggaaggaaaatcgtcaatggagccgatgctatcatcgaaacgatgatgacgttccgctttccgaaacggtctgcaagcggcccgccgagaaacgttccgacagctccgaaaaataaaaagacgaagatgtagctctgtgcctgctgaatgctgacatgataggcattcatcgcatagaacgtataaaagttgccgatcgcgctcacataccaggagcgcgcgaaaattaagaagataatcatgataagggcgagaataatcggttttgtaatcacggtctgcacagcggaggccggtgattttttacttacggcccgcaaatgaataaggcggcctttataccatttggcgatataaatgagaaacagaacagcgattgcggcgactagcgtaaaccagacagagccgaattgaccgagcggaacgagaatcagcgcggtaatcaagggcgccatcgcctggccggtattccctccgacttggtaaatcgattgcgccaagccgcgcttttcgccggcggccatgtaggcgacacgcgatccttcaggatgaaagacggcggagccaaggccgataaaaaagacacagcataaaatcgtcagaaaagacggggcaaacgcgagacctaaaatgccgagcatgcttgcggtgagtccgagcggcaaggcatacggcatcgggcgtttatccgtataccagccgatgacgggctgcatcacggaagacaccatattcagcgtaaaggcgataattccgagctgcgtaaatgtaagattcatggaacgttccaatatcggaaacatcgccggaatcaccgcttgcagtgaatcgttcagcagatgacagatcccgataatgaacaaaatagaatacatggttgtctcgggacgatggacagatttttctttaagcggggcggcaattgccaaagtgattctcctcctttttatgtaaacgaagcatacaccatattattcataaggtgaatgaattatcaagtgcaaaaaaggctcttctttctcaaacagaaaaaagagcctccctttttatttatttaacaaactgtgttttctcgaatacatcatataaacgacgatcccggcggcgatccagatgacaaaggcgagccatgtcacgcccggcaggctgcttgcgagatacaggcataagcatgcgctgatgatcggcacaaaaggcacgaaaggaacacggaaggaagatttgatctccggatgtttctttcttaaaacgatgacggcgatcgcaatgaccgtaaaggccgccaaggttcccatgttgacgagatgcgccaaggttcccaaatcaataaaacccgcgatcccggcggcaacgatccccgtcacccatgtgttttgaaacggtgttttaaaacgcgggtgaaccttggaaaacatgcggggcaaaaggccgtctctgctcatcgcaaatgtaaggcgcacctgagcgtaaagcagagcgagcatgaccgttgtaatcccgataatcgcgccgacggaaataatgcctgctatcttgttctggccgacaaattggagcgcgaaagataccggatccccgacattcagcttggtgtacgaaagcattcccgtcaggacgagcgataccgtaatgtaaaggacggtgcagatggcgagcgcgccgatgattccgaccggcattgatttctgcgggtttttcacttcttccgacgcgtttgacacggcatcaaatccgagatacgcgaagaaaacggtcgcggcgctcgtgatgacgcctttcattccgaacggcataaacggcgaccagttttccggtttcacgtagccgaaaccgacgatgataaacagcagaatgatcgcaattttcatcaatacaatgacattgttaaagcgggtgctttctttcacgcctcttgaaacaatcgcggtaatgaccaaaataatgataacggccggcaggttgaacacggcacccgttttgctgccgggtgcggcggtcagcgcctccggaagatgcagcccgaagcccgcaagaagcgactggaaataggatgaccagccggttgcgacggcggcgagcgcgatgacatattcaagcattaagtcccatccgattaaaaacgcgagacactccccgagagtgacatatgaatacgtatatacgctgcctgaaatcggaatggatgaagaaaattccgcataacaaaacgcggcgagcgcgcaggcaaggcccgcgagcacaaacgacagaatcaaagccggtcctgcgcctgtcgcggccacagtcccggtaatcacaaaaatccccgtgccgacaacacagccgattccgagcaaaaccaagtcaaaagcgcttaacgagcgggacaggctggtctgtttgctctgggcctttaagtcggccagcggctttttccgaaatagtaaagacatatgggtcctcctgaaaattcataatattcttatcgttatatacactgacgtttgtattatattgtcgaaatttctcgcagtcaattaaagaattttccactttaaaaggacaaagctaaaaagcgtcgatgcacggaaggaacgggaattttattgtgaaatagttcaattttctcaccttaagaccgatacaaaagatgactcatcaactaatttcaagtttcggtgaaagggagatgttttacatgtttcaatatgaagaactaaataagcagtttatcggcggccgatggagggatgggagcagccggaacgtattggaaaacagaaatccttatactcaaaaagtcatcacctcattccaaaaagcgacgtctgatgacgtggatgcggcatatcgggccgcggctcttgcgaaacaagaatgggacaaagtaaacccttttaaaaagcgggccattttggaaaaagccgtttctttcattgaagagcacgaagaagcgattatttacttaatcatggaggagcttggcggaacacggctgaaggctgagtttgaaatcggacttgtcaaaaatatgataaaagaagccgcaacatttccggtgcggatggaagggaaaattctcccgtccacgattgacggaaaagaaaacaggctgtacagaatacccgccggagtcgtgggagtgatcagcccgtttaatttcccgtttttcctttcgatgaaatctgttgcgccggcactcggcgcggggaacggcgtcgtgctgaagcctcatgaagaaacgccgatctgcggcggaacgcttatcgcgaaaatttttgaagcggccggcgtaccggacgggctgctgaatgttatcgtgacggatatcggggagatcggcgacagctttgttgagcatcccgtcccgcggataatctcatttacaggctcaaccggagtgggcagctatatcggacagcttgcggtcaaacactttaaaaaaccgctgttggagcttggcggaaacagcgcgctgatcgtgcttgaggatgctgatcttgaatacgccgtcaatgcggccgtattcagccggtttacgcatcaaggccagatctgtatgtcggcgaaccgcgtgctcgttcacacatctgtatatgacaaatttacagagctttacgaagcgaaagtgtcatcgctgaaagtcggcgatccgatggaccctgatacggttatcggtcctttaatcaatgagagacaggcggaaggtctgagacggtctgtcgaaaaagcgatagaagagggagcggttccggtgctgtccggccgattcagcggaacggtcgctgagcccgtcattttaaaagatgtgaaacctgagatgagcattgcgaaggaggagctgttcggaccggccgtctgcatcatgccgtttgaaacggaggatgaagcggtaagcatcgcaaacgcgacaccgttcggtttaagcggagccgtgcatacggcaaacgttgagcgcggcgttgagtttgctaagcggatcgaaaccggcatgattcacgtcaacgatacgaccattaatgatgaaccgaacgtcgcgttcggcggcgagaagcaatcaggtctcggcaggctgaacggtgaatggagccttgaagaattcaccacgctgaaatggatttcggttcagcatgaaaaacggcaattcccatattaagaaggagtgaaagaaatgagtatacagacggagcagcaaacgcacagcctgcttgacgcatttgtcaaagttgcgccttttttaaacagcctgatccaagatgacatcaccatcggaatttatgatacagaaaaattaatcgtgaatattccggctaaaacgttttctcttaacgtaaagccgggagacccgctgcaaaaaggggacatcattacagatgcgatccgtatgaatcagaagaagacaagcatggtgccgaaagagctcttcggatttccgctgatcgccagagcgattccgcttcacgatgaaaacggaaaagtcatcggcggcgtcggtctcggcacgagccttgaaaaatcagccaagcttcatgatgtcgctgaaagcctgtccgccgtcgtggaacagaccgcttcggccatcgcggatatctcagaatccatcagcggtttctcagcacagatgaccggaatttccgctcaggcgaaacaagtcagtgaaagcgcgggagaaatcgccgacatttccgtcactgtcaagggcatctcggatcaaagcaatctgctcggtttgaatgcggccattgaagccgcgagagcaggagaatccggcaagggcttttccgtggtggcggatgagatccgcaagcttgccactcattcaaaagacaacgtcggccaaattgaccagattacgaaaaaaatccacagcctgctgaaagggctggaggactctattgaatccatcaaccagaacacaaacggccaagcggcggcggttgaacaaatttctgccacgatgcaggaaatttcgggaagcgcccagcatttagcgaaaatggctgaaaacgtactcggagagtcataaaaaaagggagcttacgggctccttttttgttttcctttatcaatcggaaactgcacttacacgtttgatccgtcatgctaaaggggtacacatacgaatacatcaccaatgataaaggagagtcttgtatgtctgatgcaaatctgcacaacccgctgacgaaatatgatcatgatgaatttccaaaacaatatcaagaaccgcccggtttgcagaaagagatgaagcctgtgccggattgcggtgaaacaagctataaaggagccggcaagctgaagggaagaaaagccctcgtcaccggcggcgattcaggtatcggccgggccgccgcgattgcttatgcccgggaaggggcggatgtggcgattaactatctgcctgaggaacagccggatgctgaagaagtgaaagcgttaattgaaaaagagggaagaaaagccgttctgctgccgggagatttaagcgatgaagcgtttagcggagaattggcggaaaaagcgtatcaagagcttggcggtcttgacacgctcgctcttgtcgccggcaaacagcaggcagtggatgatatcagcgatcttactacagaacaaatctatcaaacatttgaagtcaacgtattctcgctgtattggctcgtcaaagccgcgcttccgtatctgccggaaggcgcgtctattatcacgacaacgtccgtagaagggtataatccaagcccgatgctgttggattatgccgcgacgaaacatgccattatcggttttaccgtcggcttaggaaaacagctggcgaataaaggaatcagagtcaactcggtagcgccggggccgatctggacgcctctgcagatttcgggaggacagcccggtgaaaacattccgaaattcggtaaggaaacaccggccgttccattaaagcgcgccggacagccggcggagctagcagggatttatgtctttttggcctcagaagaatcgagttatgtgacatcccaaatttacagtgtaagcggaggaattccgacagcgtaatcaataaggagctgcccttcatacggggcagctctttttttcgatgttatgtgccgagcacgttttgattatacaggacactcggatgtgacggatgataggaggcggctttgtcgttatgaatcttcgctttttctctgtcgccgagctgccagtggcagacgcagagctgcagatggggataccaggtggaatattcgagctgggtaaagcctgcatcactgcttttggcggatagggcgagttcataccaaaacacgccctgccggtattgccgtttctccgcaaaatagtcgccgagcctgcagcagaactccggacgcggacaatcgatcagaaatgattttaagagagacgtcatggcggcctcttcatggccgaccgccctgtagcaatcggatagatattggcacgttctgatctcgtcttcgatccagcactgttttgtggaaagaaaatggtgataatacgtgatggcgcgctgatactggccgtgatcctttaattcattcgcgaagtaaaacaaatcgcgcggtgtcatcgtttcactgttttccgccattttctcataaatcttcaagttgcggtctgagggaggcgagtgctttttctcggatttccggtgtgtgacggcaatatcggtttctatgatgtttccgtatacttcaagatactcatgcacggctccgatccagcggaaccctttttcacgcttgacgagtcggttgcggcggtatctgaagctgacctctccccgagcatcaaagccgacgtgataatacatggataccgcgtccacctcttttgaaagcgacgccttcagttcaatcagcttttcacggtccttttccgtcaatatatcgtcggcgtccagccacagaatataatccatttctgctttcgaaaacacaaagttacgggcggccgcaaagtgatcgatccattcaaaatcataaatcttatccgtataacgggccgcgatttctttcgtccggtcagtcgagcccgtatcagcaatcacaatttcatccgcaatgtctttgacggaatcaagacagcccgcaagcacttcctcttcatttttcacgataacgcacaaactgacgctgatcatgtcatcacctcttcccctccagtgtataaaaggagaggcggaaacattcttcggacaaaatgatctcttccaagaaatttgtctgtccttttactagttttattccagcgcctgatttaaaatgaacacatgaacttacgtgaggattgatagggaccatgagcatcataaaagcggaaaacctttataaaacatacggagataagacattattcgaccatatctcctttcatattgaagagaatgaaagaatcggtttaatcggcccgaacggaacggggaagtctacgcttctgaaaaccattgccggccttgaatcaacggaggaaggcgagattacggcttcaggaagcgtgcatattgagtttttgcatcaggaccctgagcttccggccggacaaaccgtacttgagcatatttattccggcggatcagccgtcatgagaacgatgagagaatacgaaaaagcgcttcaggcgctgaatgaagaaccggaaaatgaccagcgccagaaacagctgcttgatgcgcaggcccgaatggacgcgaatgatgcgtgggaggcgaatacgttagccaaaacggttttaaccaaacttggcgtcaccgatctgatgaaggatgtcagcgagctgtccggcggccagagaaagcgcgtcgcgattgcgaaaaacgtcatccagccggctgacctgctcattttggatgaaccgacaaaccacttggacaatgaaacgattgaatggctggaaggctacttatcgcaatatccgggcgccgttatgcttgtcacgcacgacagatattttctgaacagggtgacgaacagaatttacgagcttgagagaggcagcctttatacgtataaaggaaactatgaagtattcctggaaaaacgggccgaacgggaagcgctggcggagcagaaagaaacaaaacgtcaaaacctcctgcgccgcgaattggcgtggctcagaagaggggcgaaagcgcgctcgacgaaacaaaaagcgagagtggacagagcggaggcgctcaaagagcaaaaagggccggcagtctccggatcactcgatttcgcgatcggttcccaccgtctcggaaaacaggtgatcgaagccgataacgtcgccattacctataacggccaagcgctgatcagccggtttaatgagcttgtcatcccgggggaacgaatcggcatcatcgggccgaacggaatcgggaaaacgacacttttaaacagcctcgccggcagaattcagcctgacagcggcagtatcaccatcgggcagacggtccggatcggctactacacccaggaccacagcgaaatgaacggtgatatgaaagtcattgaatatataaaagagacggctgaaatcgtcaaaacggcggaaggcgatgtcatcaccgcggaacaaatgcttgagcgttttctgttcccgcgtccgatgcagcagacatatatcagaaagctgtcgggcggggaaaagcgccgtctgtacttgctgaatgtactgatgcaggaaccgaatgtgctgtttttagatgagccgaccaatgatctggacacggaaacattaagcgtgctcgaagattatatcgaacagttcccgggcgtcgtcatcaccgtatcccatgaccgctatttccttgaccgcgtcgtggaccgcctgatcgtatttgaaggacacggtgtcatttcccgtttccaaggttcatacagtgaatacatggaacaagcaaaagcgaagaagacggcggtaaaacagccggccgaagagaaaaaggcggaagaagagccgaagaaaaagcgcaaaaagctttcatataaggatcagatcgaatgggacggcatcgaagacaaaatcgccggccttgaagaaaagcatcagcgtctggaagcggaaatcgctgaagcgggaagtgatttcggaaagattcaagaactgatggccgaacaggcaaaaacggctgaagagcttgaagcggcgatggagcgctggaccgaattgtcactgatgattgaagaacttgagaattaagaaaagccggtacggcccccgagaaagatggcgggtcataccggctttttttatcttacacagatgtctcccggcgctttaaagacaaacgttttgtccaagcaaagtttatcaggcgtaaaaagttaacgtttacgttaaggttcaaatggtgtataatagaaacagatacgacaagagggggattcaccttggaatggatgaagattgatcaagttgccaagcgaagcggattgacaaaacgaaccattcgtttttacgaggagattggtttgattcctgctcctaaacggacagaaggcggcgtccggctttactctgaagatgatatggaggagctcgaaaaagtcaccagcacaaaagaagtgctcggtttttcccttcaggagcttcagcactttatggagatgagccgtcagctggaattaaacaaagaggggtacttgttgtcactggatccgaaggaacggaaagaaaagctggaagagattcagcacgctttgaaccaccagcttgagatgattgatgagaagatcagcacatttcagcattttaaaacgcgccttaacggaatgaaagaaaaagctgaccgcgccattcaatcaatcgaatgattttgctgtaaacgctatggatatagcgtttcttttaatggatgaaacaggaggtctggtcaaatggatacatcatcacaacagaaaacaggcttattcagccagccgaaagccgtttgggcggttgcgtttgcctgtgttatttcctttatgggaatcggtcttgtcgatccgattcttccggcgatcgccgcacaattacatgcttcacctagtgaagtatctctgttatttacaagttatttgctcgttaccggttttatgatgtttttctccggcgcgatttcaagccggatcggcgcaaaatggacgctgcttctcggacttatttttatcatcgtgtttgccgccctcggcggaagctcaagttcaatcgctcagcttgtcggctatcgcggcggctgggggcttgggaatgctctctttatttcaaccgcgcttgcggtcattgtcggggtatctgtcggcggcagcgccaaagccattattctgtatgaggccgcgctcggcttggggatttccgtcgggccgcttgcaggcggagagcttggcagcatctcatggcgcgctccgttcttcggagtatctgtcctcatgttcatagcgctttgcgcgatttcactcatgctgccgaagctgccgaaaccggcgaaacgcgtcggtgtgtttgatgcgatgaaggcactcaaatataaaggccttttgacaatggcagtatctgcattcttatacaactttggattttttattttgcttgcttattctccgttcgtgctggatttagatgaacacggccttggatacgtcttcttcggctgggggttattgctggcaattacgtcagtctttacggcgccgctcgtgcacaaagcgctgggaacagtgggttcgctcgtcgttctctttatcgcctttgcggtcattctcatcgtcatggggatctggactgaccatcagacgttgatcattacgtgtatcgttgtcgccggtgctgttctcggtatggtgaatacgatcatgacaaccgctgtgatgggttctgcgccggttgaacgttcaatcgcgtcttcagcctacagctcagtccgttttatcggcggtgcgctcgctccgtggattgcgggaatgctgtcagaacacttcaccgcaagcactccatatacagtaggcgggatcgtcgtttttgtcggcatgcttgtccttctcatgggacgcaaacatctcgccggaataaaagccggacattaagaaaaaaaggaacttccgcatgggcgggagttcctttttgtgtttacagcactttcgtcgtccaagattcacaattccatgtttccgtcgcgatatccatgtagaactcgggttcgtgggaaatcagcagaatggagcctttgtattctttcagcgcgcgtttcagctcttctttcgcatcgacatccaggtggtttgtcggttcgtcaagcacgagcaggtttgtttctgaattgatcagcttgcacagtctgaccttcgctttttctcctccgctgagaacggagacgcggctttcaatgtgtttggtcgtcaggccgcatttggcgagggcggcgcggatttcgtactgggtaaaggaaggaaattcgctccacacttcttcgatgcacgtattgttattggtttctttcacttcctgctcgaaatagcccgtgtattgatgctcgccccgttccaccgtgccttccagcggctggatttcaccgagcaggctctttaacagcgtcgtcttcccgatgccgtttgcgccgtacagggcgactttctgtccgcgctccattctgagattgagcgggcgtgacagcggagtatcgtagccgatgactaagtccttcgtttcaaaaatgagcttgcctgacgttctcgcaggcttgaaatggaattccggtttcggtttttcggccgccagttcgatcatatccatcttatcaagctttttctggcgggacatcgccatatttctcgtgctgacccgcgctttgttgcgggcgacgaaatctttcagctcagccacttcctgctgctgttttttataggcggcttcgagctgctgctttttcacttcgtagacttccataaactgatggtagtcgccgacataacgagtcagctcctgattttccacatgataaatcaaattgatcacgctgtttaaaaacggaatgtcgtgagaaattaagatgaacgcattttcatattcctgcaaatagcgtttcagccattcaatatgctgctcatcaaggtagttggtcggttcgtccaacagaagaatttccggtttttctaaaagcagtttggcgagcagcactttcgtccgctgtccgccgcttaaatcagtgacgtcgcggtcaagtccgacatcctgcaggccgaggccgcgggcgatttcttcaactttgctgtcaatcacatagaaatcattgtttgtcagggcatcttgaatgacaccgacatcttcaagcagctgctcaagctcatcagggtccgcttcgcccattttgttgtaaatctcattcatttcctcttccatcgcaaataagtaatggaacgcatctttcagcacgtcgcggatcgtttttcctttttcaagcacggtatgctgatcgaggtagccgacacgcacgtttttcgcccattcaaccttaccctcatcaggctcaagttttccggtaataatattcataaacgttgatttaccttcgccgtttgctccgattaagccgacgtgctccccttttaaaagacggaacgatacattgttaaaaagcgcacggtcaccaaagccgtggcttaaatcttttacggataaaatactcatcattacacctctatcgttatcagacacgctttatttatcatgtgtctttctcatttatgattataaaggaggagaccgtttgttaaaaggcttggaaggaaaaacaaaattgcgtttggcgcttgcatttgagatactatggagtagattttaagaattgaggagaacgacatgacccaaacatggccatttttacagcagacacaaccatttatcgccgaaaactgggaggcgtcaggttttcaggagccgaccgtcattcaggaaaaagccgctcaggtgattatggaagggaaagacgtcatcgccgaatccccgacgggaacgggaaaaacattggcgtacacgcttccggttctggagcggatcaacccggaacagaaacatccgcaagtgatcattttagcgccgtcccgcgagctggtgatgcagattttccaagtgattcaggaatggaaaaaaggctctgatcttcgcgctttgtctttgatcggcggagcaaacgtgaaaaagcaggtggaaaagctcaaaaataaaccgcatatcattgcgggcacaccgggcagggtgctcgaattgattcaggcgaaaaagctgaaaatgcatgaagtcaagacgatcgttcttgatgaagctgatcagctcgtgacaaaggaacaccgcgaaacgatgaaaaaaatcattaaaacgacgctgaaagaccgacagcttttaagcttttccgctacgctgcagccggaaacagaacaggtgctgaataccatcgcacacgaaccggccgttttgaaagtggagcggaatacggcggaaaaagcacgggtcacgcatcaatatctcgtctgtgatcagcgggataaagtgaagctattgcaaaagctgtcacggctgaacggcatgcaggcgctcgtgttcgtcagagatatcggaaatttaagcgtctatgcggaaaaactcgcctatcaccacgtggatctcggcatcctgcacggagaagcgaaaaaaatggagcgggcaaagatattatcagcgtttgaacggggagaatttccgctgcttctggcgactgacattgcggcgcgcggactcgatatcgatgatcttccgtacgtcattcacgcggacatcccgaatgaagacgggtacattcacagatcaggccggacggggcgggccggtaaagaaggaaccgtactcagccttgtcacgccgatggaagaatccaaattgaaaaaaatggccaaatcactcggaattgcgctgaaagaggccgtttattcaggcggaaaattatctgagaaataagaaacggagggcgggaagcccttcgttttttttgttgtaaaataatagaaaaggttcaggcgggggcgggaagatggtttcaatagacagatttcaaatattgaaggaacgtgagctgaaaatacttgaacactggtttaagaacgataatatcagacggagaatggatgcgatgctgccattagacgcgtggtatgcacgattgaataaagatgaagacgatactgtcattatggcatatgacggggagtgtccggcaggcatggtctctatggagtttgtggaggagcgggcgtatatcggattgatcgtcaatcctttgtaccagcttcaagggtacggaaaacagatcttgcaaaaactgctgactgaccctgggtttaccagcgtgcgggaatgggcggcaaacatcgaaaaagacaatcaaatcagtttagcctgctttcaagcagcgggattcactttggaagatacggagctggatgaagacggctttcttactttgattcttcgcggctgatccgaaaaaaagaaaaggaggggacaaagccctcctttttttatcatcatgttaacttagatcactgactttgatgatctgtttgcctttgttttctcctttaaacaggccaaggaacgcgtcaggaatatggctgaatccttccgtaatcgtttcttcataatgaagctttccgtccttaagccattcggccaattgtttcgcaccttcggaaaagcggtcagcataatcactgacgatgaatccctgcatcagcgcttttgttttgatcagcttcggctggacgcgggggcccatgttttcttcttcactttcggtattgtacgatgagatcgctccgcataccggaatgcgggcgaattcattcagcaggtttatcaccgcatctgaaatcggtccgccgacattgtcaaaatagacatcgacgccgtcaggacatgcctgttccagcgcttttttaatatcatccgccgttttgtaattaatggcttcatcaaattgaagctcctctttcaaatacgcgattttttcatcagatccggcgatgccgacaacccgcgcgcctttgattttggcaatctgtccgactgttgagccgacggcgcccgccgcgcctgaaacgacgacggtttcgccttttttcggacggccgatatcgagcagcccgaagtaagcggtcagtccggtcatccctaaaatgccgagatacgcctgggcgggtgcgatatccgtatccaacttgcggagggcggactcattgacggctgaatattcctgccatgcgagatttccgatcacaacatctccttttttcagcttatcgccgtctgtcagaacctcggcaatcactccgcctgttatggcttcatctaaagcgaacggctctacatatgattttgtatcctgcatccgtccgcgcatgtacggatcaacggacacataacttgttttcacaagcacttcgccgtctttcggttcgggcacggcaatcgtttcaaagcggaaatcgtcatgggcgggaacgcctttggggcgtcttgccaattgaatttgctgctgatgattcggcatactgaatcctccttcaagataagtggttgttccaaatgtaacacgaaccatttcccgattacaaaatcaaaccgtcagcggccataaaaaaagaagggccagggcccttctttccttatatgcatatttaatagaataaccggtacacatcggtgtttttctcatgttccaaatattcataggcattcgtttttgaagaatgaagcatgtcagcggtaatcacgggctgaagcgcggtcaggtaagaacccagcttattttcaatttctgtcggcagaacggattcgatatcaccgatattgataatcatagagaaaacgaaatcgatattaatatgaaaagtatcttcagcaaaggccgtaagctcttttattccatccgggcagcgggtttgccggcggaatacctgcttcactaaatcactgacaacccaagcgttaaatcgctgttccggtgaaaagtaatggataggaaccacctccctgcttgatcggctcatgaagatttttatttttctgatagaagtagctttccctactgtaacatgtcccgccagaaaatatccaccgacaatctgcccgatttttcacggaactctccttcttttgtttgatccttgattgagcgggtaaacatccaatatacaaaacaaaagggaggacttatcaatgaaaccggtagtaagagaatatacaaatgatcaaaaactgatgcaggacgtaaaagagcttcagcagctgggtgtcgcaaaagaagatgtatatgtgctttctcatgatgacgacagaacggaccgcctggccgataatactgatgtcaataccatcggagcgaaagaaacgggcattaaacacgcagtcggcaatatgtttaataaaaaaggcgacgagctccgcaacaaaattcacgaaatcggcttttcagaagaggaagcatcacaatttgaaaagcgcttagatgaaggaaaagttcttctgtttgtcacggataacgaaaaagtgaaatcatgggcgtaagctgaacagatcccaaggggttttcggtccccttgggatttttttgcggtttccgcaataaaaccgaaaggcgcattctgtacattttcggtgctgtttctcaactgatttgatacaattcaattgtaataaattggaacaaaggatcaggaggagcacaattcatgaaaaaattgttatttatgctggcggtttgtttgtgtatgatccctgcggacgtctatgccgctgatctgggacggcagacgttaggaacaaatgacggctggggagccgcttccggcgggacaaccggcggcgcgaaagcctcttcatcgaatgtatacaccgtatcaaacagacagcagctcgtttctgcattagggggaagcgccaacagcacgccgaagattatttacatacaaggcacaatcaatatgaatacggacgaccgcaataaaacgctcggctttcatgattataaagatccggcatatgatccgaacgcctatctgaaggcgtacgacccggacaaatggggaaaaaaagcgccgtcaggcacccaggaagacgccagacagcgatcgcaaaaaaaccagaaggcacgggtcgtggttgacattccttcaaatacgacgatcatcggctcgggttcaaatgccaaagtgacaggcgggaattttaatattaagaacggcgtcaacaatgtcatcatccgcaacattgaatttcaagacgcttacgactattttccgcaatgggacccgacggacggcagcagcggcaactggaactcggaatatgacaatatcaccattaacggcgcgacgcacatctggatcgatcattgcacctttaatgacggatcgaatcccgacagcggttttccctactattacgggagaaaatatcagcaccatgacggccagacggatatagccaacggggcgaattatattacattgtcctataataaatatcatgaccatgacaaaggctctgtcatcggaaacagcgacagcaagacgtcggatgaaggaaaactgaaggtgaccattcaccataactattaccagaacatcgtccagcgcgcaccgcgggtccggtacgggcaggttcatatttataataatttttacgcaggctctaaaagtgccgcatacccgttcagctatgcgtggggcgcgggccacgcgtcaaaaatatatgcccagaataatgtctttgaagtgccgggactggctgctgataaagtcatcagcgtcttcagcggcggaaaagcacttcatgaagacggcactcttttaaacggctcctccattaatgcgtcagccgccaacggattaagtcagtccgtcggctggacaccgtcattgcacggttccatcggctcatcatcaaatgtaaaatcagatgttatatctaaagccgggtcgggcatattaaaataataaacaagaaacacaaaggaaaatattcctttgtgttttttaattaacaaaaacgtttattaacttagttaagtagtaaaatgggataggggatggaagacaacaaaataggaggagacctgtaatggcttcagaaaaagacgcaaaaaaacagcaggcagtaaaaatcattcctttgcttattactgttgctatgggattaatcatttggtttattcccgcgccgtccggacttgaacctaaagcatggcatttgttcgctatttttgtcgcaacaattatcggctttatctccaagcccttgccaatgggcgcaattgcaatttttgcattggcagtcaccgcgttaacgggaacgctatctattgaaaatacgttaagcggatttggaaacaagacaatctggctgattgtcatcgccttttttatttcccggggattcatcaaaaccgggctcggcgccaggatttcttacgtattcgtacaacggttcgggaagaaaacactcggcctttcttattcactgcttttcagtgatttaattttatcacctgccattccgagcaacacggcacgggcgggcggcattatttttcctattatcagatcattatccgaaactttcggatcaacgccggcagacggaacagagcggaaaatcggcgctttcttattaaaaaccggttttcaaggaaacttgattacgtctgcgatgtttttgacggcaatggcggcgaatccgctgatcgccaagctggcccacgatgtcgcaggggtggacatcacatggacaagctgggcaatcgcggccattgtaccgggattggcgagcttaatcattacgccgctggtcatttataagctgtatccgccggaaattaaagaaacaccggatgcggctaaaatcgcaacggaaaaattgaaagaaatgggtccgtttaaaaaatccgaactctccatggtcatcgtctttttattggtgcttgcgctgtggattttcggaggaagcttaaatattgatgcaacgacgacggccctgatcggattatccgttttgcttttgtcacaggtattaacatgggaggacatcaaaaaggaacaaggtgcatgggatacgctgacttggttcgcggcgcttgtgatgctggcgaatttcctgaatgagctcggcatggtgtcttggttcagcaatatgatgaaatcatctgtttccggtttttcatggattgtggcatttatgattctgattgtcgtgtattattacacgcattacttctttgcgagcgcaaccgcgcatatcagcgccatgtatgcggcatttctcgccgtcatcgtggcggcaggcgctccgccgctgttggcggcgctcagcctggcgtttttcagcaaccttttcggttcgacgacgcattacggctcaggagcggctccggtctttttcggagcgggttatatatcgcaaagcaaatggtggtccatcggctttatcctgtcaatcgtccatattgtgacatggcttgtgatcggcggattatggtggaaagtattagggttatggtagaagaaaaaaaggcagactcaggtctgccttttttttatttctgtaaggaaggggaagggcctgcacatgatgactccagtgcgaatagaatatggccggggtgataatatgagcagcggccgtaatcaatacatgatattgaaacagaaaccttacaaatatatgagcagacatatgaaacgccggtatgaacaattaccatgtgaacatgaaagaccggaaacagggacagaaaaacggtttccgtcttcagatgaaaatcgatctgccttgtgcgtaccggggctgcgaggtcccgaaggcaaaagaggccccgccggctcccgcggtccgcaaggggaggcgggtccgcccggtcccccggggcctgaggggccgccgggagcggttcctgcggtagcttttcaaaatacagcagaccagatgatgattccgttagaaggaacaccgataaacgtgttaagcgcagtgatagccgcgccgacagatcaattggtgaaaacggatgccgtcatacaagtaaatgtggaattagatccgctcgcgtctcatttctcattggtcttagctctcgagctgcaaagaaatggcgtatcgatacaaacacagagacaagagcggaacctcttttcttcaggcgggcaaatcataggaattccttttacgtacatcgacgaaatgaaggcggatgaaacagccgcgtatcagctctatttatccgtcctttcttcgaattacgtaacacaagtcgcagcggcaaaccgctccctcattgcgacgggattccccattcaaggatcggattaaggtgatgaaaagaaatcaccttttttatttagattgtcaaaacacagcccgtattaatatgctgtcttaataagtaagacggtcaacaacgggaaggagagggaaaaagattgaatgaataatccgattataaacggaagctttgaaaccggcacattagcggggtggagttcggcaaatacccagattaacagttttttttgcacattcagggagatattctgcgcaatttattggagctcagccatatgcttacctcagtcaaatcgttccaatttcagccaagtcagtgactctattcgtatcactcgcaacgctcggaaatgagccaagtccccaagtcactctccagatcatctatgtcagcgcagcaggtgaacaaatcagttccattcaagaaaatattacacccggaaatttgccgaacgttctctttcacacatggtctgaaatctataaaacaagtactgtgccttctggcgcggcctttgccgtcattgtagtaagtaaagtttcttccggaacggttttaatagacgatgtttcattggcgcaaaccgggggtgaacctggcgtaacgggaattacaggtcccacaggagtgacgggccccacaggagtgaccggagcaagaggagcgacaggagtaactggtgcaacgggagcaaccggaactacgggctcaaccggagtgactggagcaagaggagcgactgggtcgactggaatgactggatcaaccggagtaacaggggcaactggagtaacaggtcccacaggagtaaccggctcaatcgggtcgacaggatcaacgggtgtaaccggcccaaccggagtgactggtccgacaggagtaacagggacgacgggagtaactggagctaccggctcgactggtgtaacaggagcaagaggagcaaccggaaccacgggctcaaccggagtgactggagcaagaggagcaaccggaactacgggctcaaccggagtgactggagtaagaggaacaactggcttgactggtgcaacaggcccaaccggcttgaccggtccaacaggagcgactggtgtaactggtccaaccggagtaagcgggtcaacaggaataacaggcgcaacgggatcaacaggccccaccggagtaacgggtccaactggatcgacaggagcgactggggtaacgggtccaactggatcgacaggagcgactggggtaacgggtgtaaccgggggaacgggaacaaccggaccgacaggcgcaaccggctcaactggtgcgacgggattaactggagaaacaggtgcaaccggctcaactggtgcgacgggattaactggagaaacaggcgcaaccgggggaacaggtccaacgggtgtaacaggagaaaccggtgcaactggagtgactggtgtaacaggtgcaaccggagaaacaggtccaacgggagagatcggccccaccggagtaacgggtccaactggagtgactggctcaactggtgtaaccggccgaaccggaataacaggctcaactggagaaacaggcgcaacgggaataactggagaaaccggctcaacgggagcaaccggagaaaccggaaccacgggctcaacaggcccaaccggggcaacgggggtaactggagaaatcggctcaacgggagagaccggtccaaccggatcaacaggttcaaccggagaaaccggtgcaacagggattactggctcaacaggtgaaaccggtgcaactggagcgactggtgcaacggggataacaggagctactggctcaaccggagtgactggagcaacaggagtaaccggggcgacgggagtaaccggcccagcaggagtaacgggatcgacaggatcgactggggtcacgggtgtaaccgggagaacgggaacaacaggagcgaccggaataacaggctcgaccggtccaacgggggagactggaccaacgggagtgactggcacaaccggaataacaggggaaactggggcgacaggtataactggagaaaccggcccaacaggtgtaactggggaaacaggtccaacgggatcaactggtataactggaataaccggctcaacaggcgcaacaggtggaaccggagtaaccggaacgactggtgcaacgggctcaacaggatcaacgggggtaactggagcaaccggctcaacaggcgcaactggtgtaaccggttcaaccggagcgactggcgcaacgggatcaactggagtaacaggagtaacaggcccaaccggtgcaacgggtgtgactggagcaacgggagtaactggggcgaccggagaaaccggagcaacaggaataacaggcccagcaggagtaacgggatccacaggagtaacaggttcaaccggcgcgactggctcaactggctcaacgggagaaaccggctcaaccggagtaacgggtccaactggtgtaacgggctcaacaggtgtaaccggtgcaacgggagaaactggcccaaccggcgcaacagggccaacaggagaaaccggaaccacgggatcaacaggcccaactggtataaccggcgcgactggctcaacaggagaaaccggagcaacaggaataacaggcccaaccggaatcacgggtccaacaggatcaaccggcccaaccggtgtaacaggagcgactggctcaaccggagcaacaggttcaaccggtgcaaccggagtgactggtgcaaccggagaaactggctcgaccggggataccggagctactggagaaaccggcccaacaggagtaacgggatcaactggcccaacaggggcaacgggtgtaactggagaaatcggcccgacgggagagaccggtccaaccggagcaacaggttcaatcggagaaaccggcccaactggggcaacaggaacaaccggagaaacaggggcgacaggagaaaccggcccaactggtgtaacaggttcaaccggagaagctggtgcaacgggtgtaactggagaaatcggcccaacgggagagatcggcccaaccggagtaactggttcaaccggagcaacaggtgcaacgggatcgaccggcccaactggctcaaccggtgcaacaggatcgacaggtccaaccggcgcaacagggccaacaggagcaaccggaaccacgggatcaaccggagcgaccggcgcaacaggcccaactggtataaccggagcaacgggaacaacaggagcgactggggtaacgggtgtaaccggatcaaccggcccaacgggagaggccggtccaacgggatcaacaggctcaaccggaataacaggagcaacaggatcgacaggagaaaccggagtaacgggatcaacaggtgcaactggagcaacaggtgcaactggagaaactggctcaacaggagaaaccggctcaaccggagcaacgggagaaaccggagcaacaggaataacaggcccaaccggaatcacgggtccaacaggatcaaccggcccaaccggtgtaacaggagaaaccggagcaactggagcgactggcgcaaccggtacaaccggaataacaggcccaacgggatcgacaggcacaaccggttcaaccggcccaacaggagtaacagggccaaccggtccaacgggtgtgactggagcaacgggtgtgactggggcgacaggagaaaccggagcaacgggatcgacaggctcaaccggcacaaccggcgtaacgggagaaaccggctcaaccggagcaacgggtccaactggtgtaacggggataactggtgtaacgggatcaactggagtaacaggttcaaccggttcaaccggagtaaccggcccaactggtgtaactggatcgacaggcccaaccggcccaaccggtgtaacgggagaaaccggcgcaaccggagcaacgggtccaactggtgtaacggggataactggtgtaacgggatcaactggcccaaccggagcaactggcacgattggctcaacgggctcaactggagtaacaggggcgactggagtaacaggtgcaacgggatcacctggagcaacaggcccaactggttcaacaggagcaacaggctcaaccggtgcaactggagtgactgggtcaacggggataacaggagcgactggcgcaaccggagcaactggggtcacgggctcaaccgggataacaggtgcaactggagcgacaggagcaacaggctcaaccggagaaactggtgtgactggcccgattggggtcacgggagcaacaggagcaaccggggcgacggggataaccggctcaactggagttactggcgcaaccggagaaactggctcaacaggagtgactggggtaacgggtccaacaggatcaacaggttcaacgggagaggccggtccaacgggatcaacaggctcaaccggaataacaggagcaacaggatcgacaggagaaaccggagtaacgggatcaacaggtgcaactggagaaactggctcaacaggagaaaccggctcaaccggagcaacgggagaaaccggagcaacaggaataacaggcccaaccggaatcacgggtccaacaggatcaaccggcccaaccggtgtaacaggagaaaccggagcaactggagtgactggagaaacggggataacaggagcaacaggctcaaccggtgcaacaggagcgaccggaataacgggatcaaccggagcaacaggcgcaactggtgtaaccgggctaactggaataacaggcgcgacgggcccaacaggtgtgactggcccaacaggggttactggctcaacaggagaaaccggtgcaactggagcgactggcgcaaccggtacaaccggaataacaggcccaacgggatcgacaggcacaaccggttcaaccggcccaacaggagtaacagggccaaccggtccaacgggtgtgactggggcgacaggagaaaccggagcaacaggaataacaggcccaaccggaataacaggcccaaccggaatcacgggaacaaccggaatcacgggaacaaccggagtaaccggggcgacaggagaaaccggagaaacgggatcgacaggcccaaccggcccaaccggtgtaacgggagaaaccggcgcaaccggagcaacgggtccaactggtgtaacggggataactggtgtaacggggataaccggtgtaacggggataactggtgtaacggggataactggtgtaacgggggtaactggtgtaacgggatcaactggagtaacaggttcaaccggagaaaccggcccaactggtgtaactggatcgacaggcccaaccggctcaacgggctcaacgggagcaaccggatcaacaggtgcaactggtgtgactggggcaacggggataacaggttcaaccggagcaactggctcgaccggggataccggagctactggagaaaccggcgcaaccggagtaacgggatcaactggcccaacaggggcgactggagtaacaggtgcaacgggatcacctggagcaactggttcaacaggagcaacaggctcaaccggtgcaactggagtgactgggtcaacggggataacaggagcgactggcgcaaccggagcaactggggtcacgggctcaaccgggctaacaggtgcaactggagcgacaggagcaattggttcaaccggaccgactggctcaacaggagaaaccggcccaacaggagtaacaggtgcaaccggttcaacaggagcgacagggtcaacggggataaccggagcgactggggcgacggggataaccggctcaactggagttactggcgcaaccggagaaactggctcaacaggagtgactggggtaacgggtccaacaggatcaacaggttcaacgggagtgactggttcaaccggaccgactggtttaacgggagaaaccggcccaaccggagtaacgggaacaaccggtgtaacagggtcaacaggagaaaccggagcgactggtgtaacagggtcaacaggaataaccggtgcaatgggagaaactggcccaacaggtgtaacaggttcaaccggagcgacaggcgcaacaggggtaacaggttcaaccggagcaactggtccaactggagtaacgggaataactggtgtaacaggaccaactggagcaacgggagcaacaggttcaaccggagaaaccggcgcaaccggcgcaacaggatcaaccggagaaaccggaaccacgggctcaaccggcccaacaggtgtaacaggagaaaccggagcaactggagcaacgggtgtgactggagcaacggggataacaggagcaacaggcgcaactggagtaacagggctaactggaataacaggcgcgacgggcccaaccggtgtgactggagccacgggagtaacaggagcaactggagtgactggagcaacgggtataacaggtgcaaccggagcgaccggaataacgggcgcaacaggcgcaactggagtaacagggctaactggaataacaggcgcgacaggcccaaccggcttaacaggagaaaccggttcaacgggatcgacaggcccaaccggttcaacgggtgtgactggagccaccggagtaacgggagtaacaggagcaactggagtgactggggcaacaggggtaacaggttcaaccggagcaactggtccaactggtgtaacgggaataactggtgtaacaggactaaccggagccacaggagtgacgggatcaacaggagcaactggagtgactggggcaacggggataaccggagcgactggcgcaacaggtgtaacaggttcaaccggagcaactggtccaactggagtaacgggaataactggagtaacaggactaactggagcaaccgggctcaccggagccaccggagcgaccggttcaactggagcgaccggaccaaccggtgcaacagggccaacaggctcaaccggatcgaccggagtaaccggaataacgggcccaaccggatcgacaggcataaccggcttgactggagccacgggagtaacaggagccacgggagtaactggagtaacgggagcaaccgggctcaccggcgccacaggatcgaccggcgcaacagggccaaccggagcaactggcccaaccggagtaacaggagcaaccgggtcaacaggagccacaggagcaacgggcccaaccggaccaaccggcgccacaggcagtacaccaaccttgctcttcacaagaaccaacgggccgctcactgtttatccgccgttaaatacagaagttcccgttgctacgctggcagtcccagttaatgctttgcagaatgtaaagctggattatgcactcagtgtcgcgttaacaactgcagccaattcaaactttgtttttgaagtgagattatataggggagcagtgcaaattcatacaagaactctgtcgcgaaccagtactctcgcagctacggatagtttttcgattgctgatacaacagtggatactgcgccgaccgcaggaacgaacacttaccagctcagggttattttcacaactgctaataatttaacgacagcaactgctctcaatatcgattttaacagcataagtttcccgacaacctcatgaaaatagcagtctgatattttaaagatgaaagacctgacttatgcacagttaggtcttttttctgtaaatgctgcatgatgcaaccttaacgaacatttgaaaatttgcccaatagaagtgggattttgccacacctttttttctcgtggaaatattatgcaaatagaggtggtgtaatgagaaaaggagatacttggtataacagatacgactcttgggattacgactgccggaattgcaatgattgttgctgtcattttcaacataaaagaagaaatcaaaggcgcagttatcaaaatcgggcccattgctgtgaagaattctgttgcaaaacttcttgctgtcatgaaagatggtgtccatgctgtcatccaaatcattttcatgtaagaggattcaccggagcaacggggctgaccggagcaacggggctgaccggagcaacggggctgaccggagcaacagggctgactggagcaacggggttcactggagcaacggggtttactggagcaacgggattcactggagcaacgggctcgaccgggaataccggagcgactggggtaaccggcgtcactggagatcccggcgcgactggagcaaccggcgccaccggagcaacgggagtaacgggctcgaccggagcaaccggtgcgactggaataaccggtgccaccggagtaacgggagcaacgggagtaaccggcgcaaccggagtaacaggctcgactggaataaccggcgccaccgggataacgggagccactggagtaacgggatcaactgggataacgggagccaccggagtaaccggatcaactgggataacgggagccactggagtaaccggcgcaactggaataacgggagccatcggagtaacgggaacaaccggggtaacgggagccaccggagtaacaggctcgaccggggtaacgggagtaaccggggatactggagcaacaggaataaccggcgccaccggggtaacgggagccactggagtaacgggatcaactgggataacgggagccaccggagtaaccggatcaactgggataacgggagcaacgggagtaaccggcgcaactggaataacgggagccatcggagtaacgggaacaaccggagtaacaggctcgaccggggtaacgggagtaaccggggatactggagcaacaggaataaccggcgccaccggagtaacgggatcaactggagtaaccggagcgaccggagtaactgggataacgggagccactggagtaacgggatcaactgggataacgggagccaccggagtaacaggctcgaccggggtaacgggagccactggagtaacgggagcgaccggagtaacaggtgcaactggggcaacaggagtaaccggagcgaccggggcaacaggagtaaccggagtaaccggggtaaccggagcaggcgcgatcattccctatgcttcaggtcttcccactgccgtgacgaccattgccggcggattaatcggaacggtgagccttgtcggcttcggcaattctgtgacgggcgtcaatgtcggagggggaggtgcaattgatcttaccggggctggaggaactctgctgaactttgctttttctgctccgagaagcggaaccattacatcaattgccgcctatttcagtacaaccgcagcattgtcgcttgtcggctcgactgttacgataaccgcacaattatacagttccacagtgccgaacaatacgttcacgccgatccccggagcatccgtcactttagctcctcccctcaccggcatattgtcaatcggcagcatcagcaacggaatcacgacagggctgaacattgcggtaactcctcaaacccggctgttaatggtattctccgccactgcgacaggcctttcgcttattaatacagtggcgggatatgcaagcgcgggagttacgatttcttaagtgaaaacggccagactggtgcggatcatctaagcttggagaagatatcactttttcttctagcttttttgtttttgcgtctttttgggtaaataaaggctgacgggaattccccgacagccggcagaagtatttacaagccttctgaagttaatcagtatcttaatgaagacgtttttagtgagttcgaatcatcctttgtgccgggagtgtgaatcatcatcgaaacagcggtgccctcatccggggtgctggtgatcgtcaattcgcttccgcaaaaatgcttcagccgccgattgatatttttcaggccgacactgcgattaatatcagaagacaaaatatctttctgtatgtccggcatgatgccggttccattatcctccactttgataaaatacgtgttttcgccttgttttttcgctgtcagctttatccgtccgccgcctcttttcttactgatcccgtgatgaacggagttttccaccaatggctgtatcattaaaggcggaagggggaagtcaatgtcctgttcaatatcaaaaaggatatcaagccgtttgccgaagcgtgttttttctatagaaagatatgacgtaatgatagaaagttcgtttctgaatgagctgatgtccgaagtgttttgaaaatcaaaactcatccttaaatagtttgtaaatgcagcagtcgtttcccgtgctttttcaatatccaaatggctgagcgcgatgatcgtatttaatacattgtaaagaaaatgaggcttaatctgcgactgaagaaatgccatttctaaatttgtggcttggtgagccgtatgcttcatcaaaattaaatttttaatacgcgcggtgaattcagagtaatgataaggcttttgtaagatgtcgtttgctccggcatgaaacgccttgtatttgtcatggctgataatggctgccgtaacgataagaaccggcagatcgaccatgctgaatctttcgcggatgtgagtgcagacttcaaaacccgtcatgtcgggcatcatcaagtctaatatgaccaagtcaagcttcgaggaagagacagcttgaagcgcctcttttccgctttttactgcgattacgttataaggaacaccttccagcatatcagttaaaattttcaaactctcgatgttatcgtcgacgatcagaatcgtcggagcatcgattttttctgagtgataaggcgtaaccagcgaaatatccgacattctctgcccgggctgtgatttaggaagttcggtctttgcttccggtaaagaatcaatttgagcggcgggtaacgtaaaatgaaaggctgatccttgcgccgccgctgactccgcccagatgtccccgttttggagcttgacgagctgtttcacaatacttaaacctaaacccgttccatcttcttccgtccctcccgcttgctgaaaagaatcaaaaatggtttcaagatcagcctcaggaatgccgctgccggtatcggtcaccgtgatttgaatcattttgtcattcaggctttcagcagaaagaataattttcccctcggatgtgtacttgattgcgttttcaacaagattggttaagatttgccggaatcggttttcatctgcaagcaccaaagggagaccgtccggcacatgattaagaatggcaagttttttatgtttggataaaagccggtagaagttcatctcactgcatatgacggcacgcacatcgacgggaaccggacgaatctgcagcataccctgcttcattttttccaagtcaagaatatcatttacgagatcagaaagtctgtagcccatacggatgatcagctgcatattttctttctcttcctctatcgtcttcttttttctgccggctacaagggtttggcatatattaataatgctgttcagcggcgtcttgaattcgtgtgaagttttggcgataaattcatctttcagttggtcgattttgactaatttccgtgagaggacttcattgtcccggaaagctccggcgaattgctgcgccatcagaagaaccaccgccaataaagcgatgactgtcggcaatgaatagatcgaattaaaagaaaaagccgttttgccgctgtaagctgaaatggtcgtaagaatcacaaaagcgctcatcgagacggatgcgagtgtaaggtacgtgcttccttttatttttcttatggcggcaatcgtaaaaatatatgtaatataaaacagagtcgtaacggcaagcacagaatgtaaaatgtatgagaggtggtcaatgaaacgtccggacataaaatcagtgatcaagatgatcccggataaagcggttaaaatggtgatcgtcgtttttgaaacaatttctctgtatgcataaaagagataaagaaaaaccgccatgctgacaagcacggttgagatgatacgcaaggaattcagcaatgaaaatgaaatagacggaaagaggagaaagataattctttctttcccgatcataagaataatggctgaaaaaagcagacacatcacggaaaagaacaataaatgtttatcctttgtccgttgcagaaaaaagccgagaaaatataaaccggtaatgaaaaaagccgtaatcataatggaatcattgaaaaaggaaatttgattctcgcgtataatttgttcttgagtcccaaacgttatcggttttgcgatcccccagccgggaacttttccgaaattcgaaaaatgcaggacaagttcattgtcacccttgtgaagcctgaaaaagctgctgtacggtttgttctgcgccttaaaatcagctttttctgtaggattgccgctctgtccgattaatttcccattaagataaaggcggtttgaactgtagatataagatgtgctgatccccaaaacctgattgtcttcatttgatcggattgtcagtttgtacgtcccgtaatccacatcggccgtttttccgaacagcttcacattgacggggacatcaacgagtacggggttttttccttttgctgaatgaagcgcctgcggtgacagcatctgatttggatatagaatccatttcccgttcagctggacatttccatccttttgaaaatcccacttttccagattaatcacgccctgttccgcttgagggagggatgatcctgaaaaatgattcaggaccataaaaatcataaagaaagcagcgtagccgcaaataatcgaaatcgaaataaatttttctttcacatcattactcctttatcccattcaggggcattctattatcttatgtaatgtataaatattgtaatcacaaacgttataatacaacaagagaaagaaaaagaatccaactatatagggcgttggacatggtataattgaaattattttcagatatatctatattgacgggtgggatgcggtttgaaagcgttaattgtggatgatgaggaactggcattgcttcattttaatcgtatgcttgagcggacaaacgcctttcaatctattataacgtttcaagatccggcagaagttctggagcattcggagctttcagcagctgatgcggtgtttcttgacattgaaatgcccgggataaacggtattgagcttgctgaatcgattcaggaggtcaatgaacatattcaagttatttttatcaccgcttataatgaattcgcgatcaaagcgtttgaattaaatgctgtcgattatcttttaaaaccggttgacaatgcccggctgctgacaactgttgagcggatccgaatgaataaaaaactcaggacggcagaagagaataccgggacggattatgttatacaatgttttgggaacctggacttttatcaatcggtaaatggtgtcaaaacatacataacagtcaagtggagaacatccaaagcccgtgaactgtatgcatttttacttcttaatcaagggcgcacggtcagtaaagacatgctgatggagatgttttggcctgcttatgatgtatcaaaagcaagcacccagctctattcgacaatatatcaaatacggaaattaatcggtcagctgcccttcagccaatcaatagaaaataccgatataggatacattctccggctttccggagtaaaggttgatacagttgaatgggaaaaaacattaaaagaggctcctccggtcagcgcagctgcactaacccggcacctggacattgtcatgtcatatgagaaccattatctcatggagaatggctatctgtgggcggagccggaaaaagcgcgtctggcccatctgtggctcagcaaagcgtacgaactgattgattttctcatccaagagaagaacgatcatcaagcgatggatgtttgcctgcaggttgagaaaatagagcccggtgacgataaaattatacaatacaaactgcagttatttaataaactgggaaaggtagaagaggcgataaaggaatacgaacgctataaacaattgaaggataaaatcaattgacgcttgaatgaccggaccggctgatgccggtctttttttgtgcgttatttctgaaataatcccatgtacagaatttgtataggccgatttcatacaatgtagtttggttcggataaggagaatcccatgcttaccggcttgttcgaacgtaagtctatataaaaggggaggaataagacattgggagtgaggaacttttcgttcagcccgaaaaaaagcaaaaggctgagggcggcattaatttcatgctttacgctgtttttcatcttcagccaagttgtcagctttactccgatcgcagccgcttccggatcacaacaaagcgagagcgggttctttgattcagttgcagtcaaagacggcagacagcagactgttgacgggtcaaaagggagtgagcccgctttagcaccgggagataaagtgacactgacatacgaatggtcgctaaaaaacaaggaagatgcaagtgaccggaatatcaccttaaagattccggaaagttttacattagataacgatgccgaaggtgagctgacatcagctgatcgggtgatcggtatatataaagctgaagcagacagcagcacgctggaagtgaaagtgaacgatgctgaagcagatgccggggatgccaaaggctccattacactgtcggcgaagtttactcccgacataacagatgagacgaaaatggcaaaagctctttttcaactggatgccggcaagacccagcaggtgttaatacctgtgaagaaagacggaacaacggattccgaaacagaaaaaaacacctcttcaacacctgctgaacctcaggaaaagacagagaaaaaatcagcatctgcggacggcggtgataaagcagaacagaaaacgaaatcaaaaccttctgctaaacgcagtcaatcaaaaatggcggtttcaagcaaatctgccgctaaaagccttcaatcaggcggaagccggattacgcaaaatattttaactgatgtgaaattgacggatgaaaaaggaaaaccatatgacaaaaacaaccctgcgaatacgaactctccggcaaatatcaccattcaatgggcgattccgaatgagctggggaaaacaataaacgacggtgatcgatatgaatttgatctgcctaaagaatttatcatgcataatgacattacgaaccagccattgaccgacggcgatagtacgtacggaactttttccattaatacgagcggccatgtcatcatgacgtttaacggcgaggtaaaagaagatactaacgtcaaggggtcattgtatgtaaacacccaattcaatcagaaagaaataaaaggatcaaccacacaaaagattaagtttccggttaactctgatacgccggacgtaacggtttattttaaaccgaatgtcaataaaaccattgagaaatcagggtcattggataaaggtattaatcccggaaaggtaacgtggacggttgatcttaataaaaaggaagaagaagttaaaaatgcgaaattgactgaaagccttccggacgaattgactttccgctctgtgaaagtgtatgaacttgatgtgaatattgacggctcggtgagtcagggaaatgagataacttcaggttataccgttggcgaaaacggtaatgtcaccttcgccgggacgatcgattcagcctaccggctcatatatgacacggaaattaaagatgaggcaaagccgggtaaaggcggaaacatcacgctgacaaacaaggcggcattcagcggagacaatgcggagccaatttctgcggaagcttccgtaacagcgggttacggaaaaatgatagaaaaatcttcgacaggttataaaggagaatcccaaacgttcagctgggctgttatgtacaactacggtgagaaaaagattgatcaatccaaagccggcatcaaggatacgttcggatcagacgatctgcatcttgttcccggttcattgaaagtccttccgattacattcagccagaacggcagcgaacaagagggcgccccattaaaagagggtgaggattatacgctgactgataacgggaacggctttgaaataaaattcaagcaaactgtcacaggagcatataagatcatttatcaatctcaagtcaacgatggggtcattattgacagtcctgtcaaatacaccaatacagcaatgacagatacaggggaatcaaaggaaactccgggaaccgccattcagcagaatctgatcaaaaattattcaaatgcagactatgagaagaagacggttgattggacaatcacagttaataaaaacggttacacaatgaaagactggacgctggatgatcaattcaccagcggaggcctggcgctcattgacgattcatttcacatgcaagacacgactgataacaaaacgctgaaagaaggaacagactatatattaacaaaaaaacccggaaatcaaggctttacaatagcattgatcggggattatgcagaaacaaacagtcagtttaagatcacgtataagacaaaattcaacgctgacttttcaaacgaacccattaagaatacggcggagtcgacatggacggataaaaacggcggcaaacgcacaaataaggaatcgagcggcttcacaccgaacaatcagacgtcccataacggattcaaaaacggctcatacaacgccgtttcaaaagaaatcacatggaaagtcggcatcaattataatggcgaaccttcaaaaaatccttatataaaagatacgatcacagatggtcagcaatttttgcatggatcggttgctgttaaaacgtataccatcagcaaaaacggctccatcactgaaggagaggcgctggatccttcaaaatatgaaatagaagagccgtcagacggcaacaaaaatacgttaatcgtacgtctcaaaacagatgacgctttaccatacctgattgaatttaaaacgtcattaaaaggccaggtcattaaacagagtcaatacacaaacaaagcagagtactttaataatgaccatgcagaccgaacgctgacgggttcagtttccatcgcaaacggaggaaacctgatttctaaaggcggcaaacagaacggaaactatatcgattggaacatcaatgtcaatgccagccaatcgacactggatgacgtaaaagtcaaagacaccccggatgagaatcaaataatagatgaagattcttttaaagtatatcaagcaaaatataatgagagcggcgttatgaaagacagcagcggaaatcttattccgggtgatgtgaagcttgaaaaagataaggactataaattagatataaaaactgacaatgccaccggtgaacaatcatttgtcctcacctttacaggcagctataaacaaatcgaccgtgcgtatgtcatacaatatcgttctctcattaatatttccggcagcagcggtcaggtcagcaacaaagtgtcgatatcagggacaaatgttgaggagcagacccaagagaacaacagctcagtgtttgtcgccatttcaagcggcggcggctcaggatcaggagagaagggaagcctgacgatatctaaaacaggatcggacggaacatctctttcaggagccggctttcaattatggtctaaagacggcaagcagctgttgcgtacgggcacaacagacgatgccggtaaacttacgtttgggaatatccgttacggaacgtatgtactgaaagaaataaaagctccggacggctacaccatcagcgacgcctatgtaaacggggtctccgttacgattgacggtaaatcctccgcagcaggagcactctataaagtcataaatcaaaaaaataaggtgacgcttatcaaaaaagacgaaaacaataatcctttggccggtgctgtatttaagcttgagaaaaaatcaagcgacggtacctatactctgataaaaaataatattgaaagcgataaaaatgggaaagttgagataaacggtttgcccgccggatactatcggctgatggagacgaaagccccatcagggtttatcgtaaacacaaaagctattcacttctcaatcgcaaagaacgaaaagaatcaagtacctgatgttgaattgggatcaatggtgaattataaaggaaaagccgctttaacgaagaaagatgcagacggcgggaatcttgaaggcgcagttttcaaaatcgtcgaccaggatggtaaaacggttcagaaagatctggtttcagataaggacggaaaaatagaaacatccggccttgcacccggtcactacgccttcatcgaaacgaaagcgcccgacggttatgtgttaaatacggagaaagtggagtttaccatctcagaaacagcggaaggaaaaccggagtcaactgacgcgggaacggccgtcaactataaaggctctgtccggctgacgaaggaaggtgcggaaggccgaaaccttgaaggtgcagttttcaaaatcatcgacagtgatggtaaaacggttaaagaagatctggtttcagataaggacggaaaagtaaaaacatccggccttgcacccggtcattacgccttcatcgaaacgaaagcgcccaacggttatgtgttaaatacggagaaagtggagtttaccatctcagaatcggcggaaggaaagccggagtcaactgacgcaggaacggccgtcaactataaaggctctgtccggctgacgaaggaagatgcggaaggcaagaagcttgaaggtgcagtcttcaaaatcgtcgaccgtgatggaaaaacggttaaagaagatctggtttcagataaggacggaaaagtagaaacatccggtcttgcaccgggtcattacgccttcattgaaacgaaagcacccgacggttatgtgttaaatacggagaaaaaagagtttaccatctcagaaacagcggaaggaaagccggagtcaactgacgcaggaacggcagtcaactataaaggctctgtccagctgatcaagaaggatcaagacggaaacgttttagacggtgcagaatttaaaatcattgacagtgatggaaaaaccgtaagagacgatctgatgacaaaagaaggcggcaaaattgacgccggcggtttggcgcccggaaactatcaatttgttgaaacaaaagcgccggatggttatctgctgtcaacaacccctgtgccgtttacgattaagactgagaacagcggaaaaccggatcaggcttccctgactgcagttaacatcaagaacagtgttgttctcacaaaatcggatcaaggtgacaaacggaaagtcctgcaaggtgcgaagtttaatctgacagatgcaaacggcaaagtactgacagagggtctgacgacagatgagcacggacaaattaatgtacggggactcaaagcaggcgaatatcaatttatcgaaacaaaagcgcctgaactttacagtttggatcaaacgccaatatcattcaagatcacaaataccgacataaaaccagtcgaaatcagtgcggagaatacactgacgcctggtgatgtcacactgacaaaagtggatcatgacgataaaaataaggtgctggaaggtgctgaattcaagatcacggattctgccggacgtccggtaaacaccggcggcagcaaagaacggccggcggtatggaagacggatcaaaagggccggtttacggtgaaaggattagcgcccgggcagtatcgatttatcgaaacaaaagcgcctgacggctatcagctgaacgaaaaaccaattgaattcacaattgaaaaaggacagtcaaaagccgttgaggtcgtcgtttctaataagaaattaaaaaatcccgcacctgggaaagacacaccgaatcatcaaacgaatcaaggcgggcatcaccctgataccaatggtaaaaccaatcactcggatacaggcaaaaacctgccgaaaaccggtgatacggacggtatgatgccggtcacggccggtattctgctgctattagccggcggagccgcggctgttgtatcaagaaagaagaaagcaaggaatagatagacgttatcgcacctgatcatgtaagaatcgatcaggtgcttttttaaaaagagaatcatttctcaccaaatactcaccgcatgacgtacaagaaaggaattttcttcatggttaaaaaaatgatcattgccgttcttattttgtccgggctgcttctcatttcctcacctctcatgaaaggctgtttgatcgcgtacctcagtaaaagccaaattgaatcggaattaaccgcagaacaagcgcggaaaaataacatgaaaaaagcggactatgattttgaatccattcatccgcccggtttcagggaaacagttcagtcaagttttaatcgcaaaccaaaaccgataatcggacggataaccatcagcagcatcgatttagaccttccgattttaaaaggcacaaccaatgaaaacctgctgatcggcgcggcaactatgcgtccggatcagaaaatgggcgagggaaactacccgttggcaggccaccatctgaagcaggagaacctattgttcggccctcttttacacataaaaaaaggcgcgcaaatcgtgatgaccgactttagaaaagactatatttattctgtaacatcaaaaaccatgatttcagaaatagaagcaaacgcaattcaggagacaaaagataaagagattacattaatcacatgcgacaaggcggtaagaaccgaaggacgcctggccgtcaaaggaaaattgattgatatttcaggtcattcaaatgtatctcggccatcatagagaaacactttgtcaactgaatatacgtccgttgtgaaacatcccgagactggcttctgtcagtctttttttgcgcagcgattataaaaagttatccttcttatctctcttgagggaaattataccagactgcactttttaaaagaaatgacaagagaaaaagatcacgaaaattctcaaaaatgagaaataaagatttaaaaaatggtatgattttaggaggaaaggacggctggtgctgtgttggaagcgaagcggttttatgtctctctgcaaatgaaaatcgccggattaattgcggctttattaatacttgtcatcggaacgctcacagttatatttgcctttcagcaattaaaggaaggccagaagcaggctgaacagctggcggtgcaaatggcaaaaaccatttcatatatgcctcccgtaaaagaggcgttccggcttgcggatcaagaggcttttacaaagttagacgtcattgaacaaatgaaagaacaggcaggcgcgcacgccgtctacatcactgatcaaaaagggcatgttgcatttcattcggcccgaagcagtattccgaaagaaaatcaaaatttgcaaaataaaaccgtcatgttcggcgggtcaccggtttccgacggaatgaaggctgtccgggggagcgccccggttattttggaggaaaaaaatcataacgaagtcgtcggaacggtgacagtcgagtttttacaagatgagatagaaaaagatatgaaagcgcatctgcggcatttaggctattttgcatgtttggtgtttcttatcggcatcgggggagcggcggcgctcgcaaaaagcatccgtaaagatacactcggccttgaaccgcatgaaattgcagcactgtacagggagcgcaatgcgatgctccttgcgattaaagaagggattatcgccgtaaacaaagaaggcgcggtaaccatgatgaatttatctgcggctgatatgctgaatcttccggaaccgatgatcggaaggcatataaaagaaatcatgccgggcgcaaatctcatgccggtgttggcagggggagaattaccgccgaacgtggaggtgcgtgccggagataaagtatttatcttaaacgtgaaagaaatgaagcagaccggacaagtatacggagcggtgatcagcttccgggagaaaacagagctcaagaaactgattaacaagctgactgaaatgaaaaaatactcagaggatcttcgggcgcaaacgcatgaattctcgaataagctttacgcgatcctcggtctgttagagctgggagaatataatgaagccattgaactgataaaagaagagtacgccatccagaatgaacagcatgaaatcctctttcaaaacattcattcacagcgggttcaggccatactattaggaaaaatgggaaaggcgtctgagaagaaagtgaagctttcaatagatgaaaacagctttttagaatcgctgccggagcatgtgggctcatcccagctcattacaatcatcggaaatcttattgataacgctttcgaagccgtcgccgaaaaagagaaaaaagaggtcgtcttttttatgaccgatatcggcagggatatcgtcatcgaagtggcggattcaggagacggcgtgcctcaggaaaaaacagaaaccatatttgaaaagggctactcttcaaaggggacgaggagaggatacggcttagccaatctaaaagaagccgtcagtgaattgcagggatcgatagagatttcgcagcaaaagagcggcggtgccgtatttacggtgtttataccgaaagaaacgccaaagggggaatcggtgtgattaacatcgcgattgcagaggacgactttcgaatagcgcaaattcacgaaaaatttatcgaacatcttgatggattcaatgtcatcggtaaagcaatcaatgccaaagacaccatatcgctgcttgagaaacggcagcctgatctgctgcttttggatatttatatgccggatgagctggggacagatctgcttccccttatctgcggccgttttccttctgttgatatcatcattattacggcttctgccgaaacaagactgctgcaggaagcgctcagatcaggcgttttccactatgtcataaagccggtgtcggcacataaatttacagaagtgcttttgcagtaccgtgaaaaaagagaatggctgcgctcacagccggagctgagccagtccgttatcgacatgtttttcggaagcggtcagaaagaacaaaaacagctcaatgatctgccgaccgggattaattcgattacacttcaaaaaatcaaaaacgcgctcagggcagcccaaaaagggatgacggccgaagaactgggcgaaaaaatgggcgcctccagaacaacggcgcggcgctacgccgagtttctcgtttctcaggaagaagcgctcgctgaattagagtacggcattatcggcaggccggaacggaaatattatttagcacatgaataagggatgggagaaatgaagcggttgggagtgcttcttgtcatgctggcggcgctggtttcttttgacggacggcagatggcgggcatccgttcagccgaagggccggttgaaattgtcgtcccggcagcgcctcaagggggctgggacgtaacggcaaaagctttgcaatcggtaatagagcggaagcaaatattaggccggcccgtaaagatcgtctataaacccggcggaggcggagacagcggctggaaatatgtaaacgaacgaaaaacggatgtcatcagtatgaattcaagcctgctgttaagcaatgaaattttgggacaaagccggctgaaggcagctgattttacgcctttggccattatcgcaaaagagtggcagaccgtcgctcttccgaaggattcaaagataaaaagcggaaagcggctgctcggcgatattaaagcacatccgggcggcataaaaatcggatttgcgcccggcctcggaaatgatgaccagctctcctttgcgagagcggcggaaatggccggaatttctccgtttgatatccgcttttttcaatacgggagcagcaatgaagtcattgaagctcttatcagccacgagatagacgccgcttcaatgaccatttcagaagcgagagacgcctattggaaagggaaaatcacattggcggccgttacgtcggacaaaaggctctccggcttcagcgatgtgccgacatggaaagagcagggggtgccgtttgtctttgcgcactggagaggcatcatggggccgaaagacatgaccgaaggcgagatcgcctattgggatcaggctttgaaacagattacctcatccgcggagtggaagcaaatgttgaaaaaacgggattgggagagcttttataaaaacagcagcggcgcaaaacgctttttagaagagcagaccgagttttataaagagatgatgagcagcgaaaaataagccttccgcatatttgcgggaggctttttatttataaatgaacaaaatgaacgaaaaggttataaaaaattaaaaatctttaaaatccaaaatatttacttcaatatccaattctcataagatagcaaaaaggcggataaaggggatcgggcctttaaaatgtaagcgtattcataataagggggacatactgtgttagcaatcttaggctttcttatgatgcttgtttttatggtgctgattatgacaaaacggctttcagtgttaacggcgctcgtattaacgccgatcgtgtttgcgctgtttgccgggttttcttttaaccgggtcggcgagatgatgatttccgggattgaacaggtggcgccgattgcagtcatgattatgtttgcgattctttatttcggcattatgattgataccggtttatttgatccgatggtgtcgcgtattttaaagctggttaaaggcgacccgctcaaaattgtagtcggaacagccgttttgaccatgcttgtcgcactggacggagacggctcgacgacgtatatgattacgacaagcgcaatgctgcctttgtatatcatgctcggaatccgtccgattattttagcgggaatcgccggtgtcggcatgggtatcatgaacacgataccatggggcggcgcgacgccgcgtgcggcgagtgcgctcggcgttgacccggcagagctgacggggccgatgctgcctgtcattgccagcggcatggtatgtatgattgtggtcgcttatgtactcggaaggatggaaaggaaacggctcggggtgatcgaattaaagcagccgtcccatacaaatgaaacggctgcggctgcggaagatgaatggaggcggccgaaactatggtggttcaatttagtgttaacgctttctttagtgggatttttagtgtcaggaaaagtgaatttaaccgtgctgttcatcattgcgttttgtatcgcgctgattgtcaactatccgaagcttaacgatcaaagggagcgtatttcagcccattcgagcaatgtgcttgcgatcggttcgatgatttttgccgcaggcgtgtttaccggaattttaacggggacgaagatggttgatgagatggccatttccctcgtatcgcttattccgggacagatggggggatttattccggcgattgttgccttaacgagcggtatctttacgtttctgatgcccaatgacgcctatttttacggcgtgctgcccattttgtccgagaccgccgtggcgtacggtgtagataaggtggaaatcgcccgcgcttcgatcatcggccagccgattcatatgttaagcccgctcgtgccgtcgacgcatttattagtcgggcttgccggggtcaccattgatgaacaccagaagtttgcgatgaaatgggcggttcttgccgttatcgtcatgacggcctttgcgctcatcatcggcgcaatcacgattttttaacataaaacacccggttcgtcgcacactaaaggcatcagaggaggtgccatgatgagtgatccgtttatgccgcttttttcagtgagaagcggggccggttttaaagcggcggacggcgtttacggactgaccgtgcagattgcgaatgtttactttatcgaaaatccctcagctccgcgggaaatcattctggttgacgcgggaatgccgcaatcggtggagatgataacagaagaaatgaaatgccgattcaaagaggggtatcagctgaaggcggtcattttgacacacggtcattttgatcatgtcggtgcgattgaagagctgcttgagctttgggatgtgccggtttacattcatgaaaaggagctcccgtacgtcacggggaaagcggattatccgcctgccaggcccgatgcgaaaaaagggcttgtcgcaaagctgtcaccgctgtttccgcgccattcgatccgcattccgtccgttcaggcactgccttcagacggtaccgttccgtttcttgaagaatggaaatgggtgcatacgcccggtcacacacccggccatatttcattattccgggataaagaccgcgttctgcttgccggtgatgccgtgatcactgttgaacaggaatcgcttgcggacgttgtcattcaaaagcaagagcttcacgggccgcccgcctattttacagcggatacgcagacggcggccgcatccgttcagaaactggccgaactggagccggaagcgcttttgacgggtcacggaattccgatgacgggaaaaaactaccgtgaggatttgcttacactggctgaaaaactgcattccgttttgtaaaacacctgcgaacatcacaggtgttttttctttgcagtttccagtatgatacaaaaaaaccattgtgttcactcctaaaaacgatacaatgggaaacagatgtaaattgaaggagagagttttttgaaacatacggaaatactttgggatgaggcgaaggattttattgatgtctgctatcaggaactcggaatggaatcgcaaatcaacgctcgtctacacgcgataaaagatgagatagatcggacgggaagttacgtccatacggcggaagagcttgaacacggggcgaaaatggcgtggcgcaacagcaaccgctgtatcgggcgtctgttctggcaatcgctgaacgtcattgaccggcgcggtgtgaacacgaaagaagaggtgcgcgacgcattatttgaacatatcgaaatcgccacgaacggcggaaaaattaaaccgacgattacgattttccctcctgagaagaatggggaaaaacaagtggagatctggaatcaccagctcatccgctatgcgggatatgagactgaaaaaggaagagtcggtgatccggcatcatatgagctgacggctgtctgcgaaaaactcggctggcgcgggaagcggaccgattttgatattctgccgctgcttttccggatgaaaggggacgggcagccggtctggtatgacctgcctcagacgctcgtgaaagaagtgccgatcacccatccggatattgaagagtttgccgatttaaatctcagatggtacggggttccgattatcgccgatatgaggcttgaaatcggcgggctgtcgtacaacgcggcgccttttaacggatggtatatgggaaccgaaatcggcgcaaggaaccttgctgacgaaaaacggtatgatatgctcaaaaaagccgctgcggtcatggggatttccgccagcctgaataccgacctgtggaaagatcaggtgctggtggaactgaataaagcagtgctctattcatacaaaaaacacggtgtcagcattgtcgatcaccatacggcggcgaatcaatttaaacgctttgaagaacaggaacaagacgcgggcagaaagctgacgggcgactggacctggctgattccgccgatctcgccggcttccacccacattttccataaatcatatgacaatacgattgtgaagccgaattattattatcaggacaagccttatcagtaactgatggtaaaagtgcggtaccctttcagacggtgtgattcttcgatggttacgcctgtgacatttgagaaggggctgccttttctgactgcttcggcaaattgttttaacgactcttcaggaccttcggcaaggatttccacccggccgtcatcacggttttttacccagccggctaccttatgtctgtcggcttccatctggacgaagtagcgaaaacctacgccctgaacccggccgtctgcaatcatatgatattgaagcatggaaaaaccacctttttcttactatgataaaggaaagatatgagatttcgcaaaggatgtgaacgaggtgacgcaagactattctgtcttatctatcaatctcggaaagcccgcaattcatgaatttgccggcagacaaatcaattccggcatcataaagcggcccgcagattctcccgtcatgctgtataaaacccattttgacggggacgggcaggctgatctgaagcatcacggaggtcccgataaagcggtgtgcgtgtatcccgccgagcattattcatattgggaaacaacgctcgcaagaaaacttcccgccgccgcgttcggggagaatgtaacggtcaaaggactggccgaacaagacgtgtggatcggagacgtctttcagctgggggaagccgtcgttcaagtaagccagccgcgccagccctgcgtcaaactcgcgctcaaatatggcatcaaagatatggtgctccgtgtacagcagacgggatttaccggcttttatttcagggtgcttgaagaaggatatgtcgatccgcgtcccgtcctcaagcgtctgtcgagaggaaaagaaagcatttccgtctggtatgcgaatgaagtgaaatatcgtgattccggcaatctgtcagcgattgaagaaatactgcgggaagaagcgctgtcagaaagctggagggagtccttccttaaaaaaagagacaggctcactaatgtatagaaaaaaagccgtgctgcactgacagcacggctgatttacgttatgcttgtttttttgtttccagcagattggcaaggaagtactttttgaagctttgaagctttcttccttcatagtgggtaattccttttttctttaactcttctacataccagcctttactgccataatgcatgtcagaaaactcctttctccgttctcccgctggggaggtttcttcagcttttgccaaacttttggcattgtaacatctataaaaagacgctgaaaagggataatgcaaaaactgagactttcgattcagagatgtaaagctttcttacatatatatgtaaagggcggtcttttcatgcttaatggccggttaattttaacagcaccgttccgagtgtcatgattccgaaaacgacgccgaaataaatcagcatccccttctttttcttcactccgtaaacggtgagaatgatgctttcaataaagaaaataaacccgaagataataaaccacatgttgaaaaatggctcctttcacagacatatgtccagtgtagcacaactcttataacggagcataaaaaagccgggcactgtatcagtgtccggcaagtttgacgagaagctgggccaaatgctgtttttcattgtcatccgcaatgtcccacagttcttgtaagagtttttcttccgcattgcggggctcctcgtgtttggcgagatagtccccgaggatggcggcgcttttgatgattttgctgtcatccagacccagtttttttccggcggaaattttctgatgaaggtacgccttaaattcctcgaaatcctctaaaatctgctgtttcgttacgccgtgcatggcgtgtatttcgttttcgattttgattttttctttatcttttttcatgcgtctccctccttcgggttagttgttgtatacctgtttggaagggagatgaaacattacaatgcagttaaaataatcggtttgtcttttgtgatcacgatggtgtgttccacttgggcgacaaggcttttatccggcgttttaaacgtccagccgtctcccgcttcaacaatcgtttccgctttcgtggaaataaacggctcaagcgcgatcacggttccgtttttaaacagcgcgttatcaaacggatcgtagtaattcatgatgtggttcggcgcttcatggaggtttctgccgattccgtggcccgtcagcgttttaataacggtaaatccgttggagcgggcttcatggtagacggctctgccgatctggttttggcgtttgccggcttttgcctgatccaatcctttctgaaatgcggatgctgcgcagttacaaagcttttgcagacgttcatcgccttctccgagcacaaatgaaattcccgtatcggaataaaaaccgccgaactccgccgaaatatcgatatttacaagatccccggcttttaagattttagaggcgctcggaatgccgtgagcgacttcgtcatttacgctgatgcatgtcacgcccgggaaatcgtattccttctccggagcggaagcggctccgtgctcgtcaagcacagcctttccgatcaggtcaagatctttcgtgctcatgccgggctcggcttttttcttcatttcttcacgcgccagcgcgacgattctgccgatttttttaaggccttctaattcttgatcgttcgttacaatcattgtcattcccgctttctatttttaatcatctgattcaagcttaccacaactggtttataaatagaaaaccaacaagccttatgtgaataaatgaaggaaaattggtatagatcactagataacttatgtggtatatttaagaaaaaagaagggggatgggtaaaatgcttcaatttttgcaaaaactcggaaaatcatttatgcttccgattgccgttctgcccgccgttggtattattttggccatcggcagagaggacttattaaatattccgttcatttacgcggcggggaccgcggtatttgatcatctgccgctgattttcgcgatcggaatcgcgatcgggatttcgaaagacagcaacggggccgccgctctgtcgggagcaatttcttatatcatgctggacgcggctgtaaaatcaatcaattcgacaaataatatggccgttttcggagggattatcgccgggttaattgcgggatacacgtataatcgctttaaggatacgaagctgcccgaatatctcgggtttttcagcgggcgcaggctcgttccgattgtaacggcgctgattaccattattttggcggggatcttcggatttgtgtggccgccgattcagtcggtgattacgtctttcggggaatggatgatcgggcttggcggaatcggcgccgggatttacgggatttttaaccggcttttgattccattcggtcttcatcatgtgctgaataatattttttggttccagtttggcgattttcacggaaaaacgggagatctggcccgcttctttgcgaaggatccgacggcgggaacttatatgacgggattcttcccgattatgatgttcgggcttccggccgcatgtctggcaatgattgccacggctaagccaagtaagcgcaaagcgacggccggaatgatgatcggtctcgcgctgacggcatttattaccggaattacagagccgattgaatttgcatttatgtttttatcaccgcttttgtacggggttcatgctatattaaccgggttctctttatttatcgtgaatgttctcggaatcaggtcaggtttttcattctcggcgggggcgatcgattatctcctcagctacggcattgccgaaaaaccgctattgctgctcgttgtcgggctttgttatgcggtgatctattttgtcgtcttctatatgctcatcaaaacgttaaacttgaaaacgccgggacgggaagatgatgaggaagaggaagaagtgcttagtgaagatacggccggttccgtcgaagaacatgccatgctcaaggggctcggcggcaggcaaaacctcgaaacgattgatcactgtgcgacccgcctcaggctgaccgtgcaggatacgtctctcattaatgaggcggcgcttaaaaaagcgggagcaaaaggggttatcaaaacggggaataaaacggcgcaggtcattatcgggccgaacgtcgaatttgtcgcggaagagctgagagaagccgtccgccgtgacgaccagaagcagacttaaaaaatccggatcacctaggtgatccggattttttttgaacatatatcaagtttcacataatgtacaaaaaacaacgttttcttctatgttaagattcatgtagaacaagtatggagatgatgtaaggtgacatggattgcagttgtttcaattgttgtcataagcctgattaagattgtgctgacatgccttcctaccggagcggtggaatggatcctccgcaagtttgaaacccattcaaagctcagtgacgcgtccgctgccgtttccctcggcggaaaacgtctggaaggcgaagacaaacgccgggtgattgatgattttaacgaagccgtgtttatcgaacggcattatatatacccaggggatgaagagcgttatcttcatccgcaaaacggagccgatccgcttgtcattaagacgagaaaaggaaaaaaagatgtgacggtgtttgtatacagctacggagatcatgtagatgtcgtcaaacagcagaaaaagaaagtcgtcgcttattcagttctttccgacagcctgcaaaagcgctctatggccgccgccgggagctgaacataaaaagccagatcattgatatgatctggcttttgtttattctttttgatcgtctgctgaggaatcttcacgcttcgtataatcgaattgtgaagggtccactttcttaaagcctttcggctgatagaaacgaagcagatcgccgttgatgatcttatcagacatttcaagctcagtcttgacgagagagtcttcttttttgtcgacttctgaatcatctaaaagtcttccggtttttgtatcgtaatacttgccggacactttcgtatagttcggcgagatgaagtctccgttacggaacggaatgacttctctgtgttctttcgataagatatctgaacctgacatgagataatctttcgtatcgacgccgagcagatgaagaacggtcggcgcgacatcgacttcaccggcaaatttgtgattgcggccgcctttcacgccgggagcgtggataaagagcggcacccgctgaagctgggcattgtcgtattcagtgatctcatctttgccgagcactttcgccatcgctttattatggttttcggagatgccgtagtggtctccgtacatcacgataatcgacttatcgtacaggccgtcttttttcaggtcatgaaagaactgttcaattgattcatccagatagttcgcggactggaagtagttattgacgactgaatcgccaaagtctcccgccgggaagtccgtgtcttctttatccattccgaacgggaagtggttggacagcgtaatgaacttcgtatagaacggctgcggcaggctctttaagagcggcatggattctttgaaatacggtttgtctttcatgccgtagtttttcgtgttttcttcgctcatgtcataataagcggaatcgaaaaacttatcgatgccttccgctttgtacatttcgttacggttccagaaagtctgcgtatttccgtggaaagcggcagacgtgtactttttgccttttaagatcgcaggaacggactgcagcgtgttttgcgctttattgacgaaaaccgaaccttgcgaaagcgggtacagagagttctccatcataaattccgcatcagatgttttaccttgtcccgtttggtggaaaaagttatcaaagtagaatgtttgattatcgtgcgccagtttgtttaaaaacggcgtcacttccttgccgttaattttgtaatcaatgataaaggactgcagagactctaatgagacatagatgacgttttttccttcggcttttccgaagtagacgttattcggcacgtcatagttggccttcatatagttttccacatccgttacatcgcttgaatcggcaagcgcgcgctggctgtttgatttcacattctgcacggcatcgtaaatcgtaaagttgtacgtgcccaagtatttcaccagatagttacggtcaaatgagcgtgtcaaaagctcgggacggtcggattccgcgacggcgaggttgatcaggaacataagcacggcggaagccaaaacgattctgaatgatttcttcgccggtttttcagccggttttctcatcttaagggccaaaataatcaaaatgacggtatccaggaagtagaaggcgtctgtccatctcattaacgagaacgcgctgtctccgagctggccgccgtttgtctttgcctgcatcatgaccgggatggtaatgaaatcattaaagaatctataatagacgatgtttgcaaaaagcaaaaaagacaataaaaaatgaatcacaataatggctgtctgctgtaattttttcttgaaaagaagcccaagtccaagaaagaacaagctggagctcagcggattcacaaaaagcaatattttctggatcgtgttgtctatgccgaggttaaagtttaaaatataagcgacatatgttttcacccacaataacacgaccgctatcaagaagaaggcaagtcctctttcttttataaatgttttcattgttacactccttttttccgatcacggtttacacggaacgatagaaaaaacgaacgtaatcaatataccatgaaaccagcaaatagaaaaggtggaaaaggctcatcggaaaaagggcgaaaaacgctgtcgcaacgggggttgatctgttgaatgacagctttaaaacatataaatggcacaaactgggctttgtgtttccctttaatcatacccggttctattgaaaaaaggaggtgaacagtgatggatatcgcccatatcgtggctgaagataaaatcaagcgcgccattaaggatggagagttcgccggcatcaacggaatgggaaagcccctgccgaaagacgatgccgcacatcttccggagtcgctcagaatgggctaccgcatattaaaaaacgccgggatcgccgaggatgagggcgcgctgaagaaagagctgatgacgctcgattatttgatcgccaagtgccgcaatgaacaggagcgggatcacttgcggaacaaacggacggaaaaacaagtcagactcgacaaactgacggaggagaaagccatgttctcaaaacccgcatcttctcattataaggagaaagtgtacagacggctgggccgcccgtaagccggctctttagatttttttctgaaaaggaatgtgctccataaggcgcgggtaggaaatgtggagcaggccgtttacgcactgcgcctgtaacaggtggggctcagccggttcaggaagctcaatcgtctcatcgatttccccgtaataccggttttggcagacgcccatgttctttggaaaaaggggtgtgatgtttcctcttatatgcagccgtgttcttgacagcagcctcaatgtcaattcttcttcgtaaacgccgggcatttccacaatgacaaatgtgtgctgttcatcctgataaatatcataagtcagggtgtttttttgtaaggagaaaaaatcttcgggagatttccgtttcaggacattggtccaaaagtcgctgggcttgtgctcgttcgtaatctcaagccactttctcattttttcgatatccacttcggcagaacctccctatatttgatttgcgatcggcattgacgggttggcgatctgatcctgatcgctcacgtcagggtcaagatggcccgaattcaaacatccggcggccggcgaaaaatcccctaaagaaaagttcgcgccgacaaatttgctgttggcggtgtggctgttttgcacggtctgaccgatatcgacgtttccgttttgcgttgctccgtttacttttatattgacgacgttaatttggtaaggcattcataaaaacccctttaatctatagtcggcggtaccggcataacatttgcggtatctgcggttcctatttctgtctggtcgttgacatcaggatcatttaacaagttctccatcatcgattctataggtgacgtatcgccgaatgaagagttcagtccttgtgatttgttatttgtggtgggactgttgtatgccgcttccccaatcgtaatagatccgttgccagaaatactgttaatcttcaaatagtacaggttgataacagtggatggcatctcttcacacctctttaacttagttgtacagtactgtatgctttttgtgctcctgttgtgaattccgcccggacatgttcccgataaaacaagaagtcaaggcccggttccggcggggccttttttgtttcagggtctttcgcagtatatttgtgatgaaagcgctataaaaatagattgacgacatgtatatacatcattacaatagagtcataaacatgtatatacaagtttgtaagacaaaatgaaaacggttacggaggggttggcatgggtgagtttaaccgggctgcgcggcagatcgctgaagctgtcggcggaatcgaaaatattgaggcggcgactcattgtgtgacgcgtttgcggtttgcattaatagatgaaaccaaagtaaaccaaaaaatgcttgatgcaatagacattgtcaaaggatcttttgcggtaaacgggcagtttcaagtcgtgatcgggcaggggacggtcaacaaagtatatgcggaattagtgaaggaaacggggattggcgaagcgtccaaggatgacgtgaagaaggcggcggcgcaaaacatgaatcttttacagcgtgctgtgaaaacgcttgcggacatctttattccgatcttgccggcgatcgtcacggccgggctgttaatgggtctgaacaacatcttaacggcggaaggtattttctacagcacgaaatcgattgtccaagtgtatccgcaatgggcggatctcgccaatatgattaatctgatcgcggggacggccttcgcttttctgccggctttaatcggctggtcggcagtgaagcggttcggaggaagcccgctcttgggcatcgtgctcgggctgatgctggtgcatcctgatctgttaaacgcatggggctacggggccgccgagcagagcggcgatattccggtgtggaacctgttcggccttgaggtgcagaaagtcggatatcaaggtcaggtgctcccgattctgctggcgtcttatttacttgccaggcttgagctctttttgacgaaacggacgccggagggcattcagctgttggtcgtcgcgccggtgacgcttttggtcatcggttttctatcctttgtcatcatcggtccgattacctttgcgatcggtaacgcgctgacggcgggattgattgccgttttcggccaattctccgccatcggaggcctgctgtacggagggctgtattcggcgcttgtaatcacggggatgcatcatacgtttctggcggtcgatcttcaattaatcggatcaaagctcggcggcacatttttatggccgatgctcgcattgtcaaatatcgctcaaggatcggcggctttggccatgatgctgattacaaaagataaaaaacagcgggggctttcactgacggccggcatttccgcatatttgggcattaccgagccggcgattttcggagtgaatctgcgttacaaatttccgtttgtgatcgccatgatcagttcgggaatcgcggggatgttcatctccgtcaaaggcgttctcgcaagctcggtcggagtcggcggcgtgccggggatcttctccattatgagccggtactggggtccgtttgcgatcggaatgctgatcgtgctgattctcccgtttgcgggaacatacgggtatgcgcggctgaaacggcaaaaataataaacctgcggggcgccttctatcaggctgtcccttttccctttcaattcaaaacattacaggcggtgaagaaaaatgaaaacagacagcacaccatggtggaaaaaggctgcggtatatcaaatttatccgaagagctttaatgatacgacgggaaacggaatcggtgatctgaacggtattatcgagaagcttgattatttgcagaagcttttgattgatgtcatttggcttacgccgatttacgattcgccgcagaatgacaacggttatgacattcgcgattactgcaccatttatgaagaatacggaacgatggaggattttgaacgccttctcgatgaagcgcacaaaagaggaatcaaggtcgttatggatcttgtcgtcaaccatacatcagtcgagcatcggtggttcaaagaagcggtctcgtcacccgacagtccgtatcgggatttttacatttggaaagacggaaaggaagacggccgggcgccgaacaactgggaatcaaaattcggcggttccgcttgggagctcgacccggcgtcaggccagcactatctgcatttatttgatgtgtcgcaggccgatttgaactgggaaaatgaagagatgagaaaacaggtttacgacatgatgcatttttggttccgaaaaggaatcgacggtttccggctggatgtgatcaacctcatttctaaagaccaatcgtttcctgatgccgaggatgggcgtgacgggcgcccttattatacggacgggccgcgcgtgcacgaatttctccatgagatgaaccgggaagtgttttcgaaatatgacagtatgacggtcggtgaaatgtcctcgacaacggctgaccactgcatccggtacacaaaccctgagaataaagaactcgatatgacttttaactttcaccatttaaaagtggattatccgaatggtgaaaaatgggcgctcgctccgtttgattttctgaagctgaaacggattttagcgttttggcagacggagatacaaaaaggcggaggctggaacgcattattctggtgcaaccatgaccagccgcgggccgtatccagatacggagacgacggcgtataccggacgaaatcagccaaaatgctggcggcggccattcatatgatgcagggcacgccttacatttatcaaggtgaagagatcggcatgggcaatccgaaattcgatgacatcggctcataccgcgatgtcgaatcattgaatatttacaaaaagatgaaggaagaaggcgtgcccgaaaaagacattatcgccattttaaaagagaaatcaagagacaatgcaagaacccccattcagtggaacagcgggccgcacggcggtttcacgacaggcacgccttggattccggcggcggatgattatcgggacgttaacgcggaagcggctttgcgggacccggattcaattttctatcattatcagaagctcatcatgctcagaaaggaatatgacatcgtgactgaaggaacgtttgagctgcttgctgaagacgatccggcggttctggcgtacgtcagacacggcaaggatgaaaaactgctgtgcatcaacaacttctacgggaaagaagcggactttacggttccgcttaaagacacggacggctggcggtttacggtgctgctgacgaatgatgaaccgagggaagggcggccggaacgattgacgctccgtccgtatgaatcgatcgtttatcatctgacaaaagcgtgatacactaatctgggtggtcaaatgaaagtgaataaatacatcacaatctataaagatatggtgcggcagatcgaaagcggccagcggaaggctgaagacgttcttccgtctgaaaatgatttgtgcgatcaatacggcacatcacgagaaaccgtccgcaaagcgctcaatatgctggcgcaaaacggctacatccagaaaatcaaaggcaaaggctccgtcatattagacagagaaaaaatgcgttttcccgtctcaggcctgatcagcttcaaagagctttcggaaacgctcggaaaagagacgagaacgacggttcaccgtctcgggctgatcctgcctccctcagaagccgcaaaagagcttggtacagaagcggatgaaaaggtgtgggaagtcgtcagatcaagacggattgacggagaacaaattattttggacaaggattactttgtaaaaaaacatgtgcctctattgacgaaggcgatttgtgaagattcgatctatgagtatctcgaaggagagctcggcctgtccatcagctacgcgcaaaaggaaattgtcgtggagccggcgggggaagaggaccggaagtatttggatctcggcggattcagccatatggcggtcgtgaaaaaccgcgtctttttggacgataccagcctctttcagtacacggaaagccggcacaggctcgataaattccgtttcgtcgactttgcgagaagagaaaaataaaaacggactgccgcggcagcccgtttttttgtcagtatcaaaatgaatactatccaacaaaaatgtgcgtactggtactttcaaaaataatggctacaatagtacataacgattgaaaaggagagatcatgaatgtcagataaaaaacagcagatcatcgaagcgtatcaattcagacacgccacaaaggaatttgatcctgagaaaaaaatttcagaaagcgattttgaattcattttagaaacgggaagattatccccaagctcactcggtttggagccttggaaatttgtcgtcgttcaaaatccggagcttcgtgaaaaactccgcgagttcacatggggcgcgcaaaagcagctgccgaccgcaagccatttcgtacttctgcttgcccggacggcaaaggatatccgttttgacgccgactatgtcaaaaaccacttgcgggaagtcaaaaaaatgccggaagatatgtatgaaggctatatcagcaaaacggaagactttcagaaaaatgatttcaatctgcttgaatcagatcgcgcgctgtttgactgggcatccaaacagacatacatcgctctcggcaatatgatgacagccgctgcgcagatcggaatcgactcctgccctgtagaaggcttcaactacaaagaaattcaccggattcttgaagaagaagggcttctggaaaacggaagtttcgacatctctgttatggccgcattcggctaccgtgtcagagaaccgcgcccgaaaacaagatctgcctcaaaagacgttgtaaagtgggtataagataaaaaaggctgccgggcgtgtctcggcagcttttaacgtttatttggttttgctaaaaaacaggcggtaatccaggacgtaacgggaatgatgatgccgatcccgattccggcacaaagaatggtgacggcttccgcactgaatacttttgagttcactattttttcagctgagtatgataagtctttaaaccagataattaaagccaaatagctgccgaaaaaagcaaagaataacgtattcgtattcgttcctaaaatatctctcccgatgcttaaaccgaatgtgtacagatcttttctgctcatggacggattatgactgtaaatttcccgcatgggtgaagtaatggaaatcgcgacatcggtaatcgcccctatcgtgcccatgatgatcatggctgcggtaaccttcacaaaatccaccccgacaaacagtgtgaatatgccgatatcacccaattcttcttcaccgaatccctgaatcgaagtatgttttgttacagacataataaaaaacagcagcagtacaatcgtcagcattgcagaaataaaggcggttacggttttgacgtttcctccattaatataaaaaagagtaatgctgcaaatcacggcggaagagagcaatgttaaaacaatcggattgatatgcgggtctgtcatgaaaatgatggtgagaaagagaacaccgaaatttaagaataacgcaataaaagacctcgctcctttttttccgccgatgatgaccatcaatagaaataaaatcgccgcgagaattacgatgacattcatgagcttgccttctttcgtttaataaaaaagatagaagcatacagactggcgggtatggctaatacgattccgatccctccggccaatgctctggctatttccaaggaaatgttcatagaaagagtgaatcctatcggggaatcatttttcaaatacaacagcatcatcggaatagagccgcttatataagcaaaaaacagaatgttggtcatcgcccccatgatgtcttttccgatctccatcccggaacgtctgagagcttgtaatgagatacccttgttttcttcatataatccgaagacagatgacgtcatggtaatggctacatccatgaccgctcccagtgatccgataaataccccggccatgaacaccgtgtgataagggcgggttaaatactgcatttcctcatatctgagacctttctctccggttgccagcatcaccagatacgtaatcagcagggaaacgaaagtgcctgcgagcgtcgcggcaatggcagcgtatgttttcgcgtgaaaaccgctgacaagcagcaatgagatgacagtaaagatgagaatacagataccgcagatgaaaattaaccctatattaggatgcttcctgtacaaatctaatgcaaacgacagtaaaacggcgttaaatatcaggctgacgatcgaaaagaagccttgttttttgccgacgataagcaaggtgaagatgaaaacccaagcgatcagcaaaagctgcttatcccgttttttatctataatgcttcccgatatatccttgtttgatggtttccctttatcaatagaaacgaatacttcatcgccaatcgaatatttctgatcattcgctccggatgatgaatactgattggacaaatgaatgagctgtcctttctgactgccgttttcaagtctggctgtgatcgtctgattgaaaatcttatctttgtttttatgcatgtcctgtacgtcagactgatgttccaatgttgttttcgtcactttggcaatcggccgctcataaaaagaagcgttgtgagtgacgaaaatgagcgagctgataaaacagagcgctgttatcacgtaaaacagctttttcttgtaagacatgcggtttcgtttgtgtcctgttatcttcaaaaaaagtcctccaaacaggcggcgccgtatgaaagagaggccctgccgtgaagtgttaaacgatgcggatgcagtctttcgcgaataacggtcatattttatcactcggccgtacggctgtcgactcagagggggaccgagagaaaaagctcccctgaaatcagatcaggagagctcttgggatgaaccgcccgataaaagcggtctttttatgcttcgttcactttttttgcttttcttctttgatacagatacagtgcggttccgagcgcgctgatgagaaacccggcaagaaggatggaatacatcgttgtggccgtatcaggaagcaggccgcccggcgatactccgtcctgtgcagggccggatgacggtttttgtccgtttggctgctttccggagccgtggtctccgcttgtcggcggcgcgctcttcgtgtttgcgtttaatatggtgtattcactgaaatgatttgtatagcccgtgacgagatcgtgtgaaaccgaaccgttgtctgtttttgtatagacgttctttttccggtctacatggtaaatgcccggctgtttcgcctttttcgtattctcaatgcgcagggtgagctttcccggcgctttgaatgttttgatgtctttgtttttctgcttcattgtaaagtcgtatacatttgaaagcgccccgcttacttttcctttcggcgtcacgccgaatcgtgtatcagctgaagcagcgtttgccatcggcattttcatgctgaacttgtcatgcaggatcgtaagggaagaatccgatgttctgtcctttaacaggccgatttgttttttggtcacgctgagatcaatcggctttttggcgccgtcattcttatcgtaatacacgatcggcgtgttggcgtttttggcataaacggcaaatgcgctgtcatcttcaagcgtccacgaaccgtttttttgtttcgtcggcagatacacttcctgcgcgcggccgtcaactttcggttccaccgcttttcccgctttttcaagctgctcggtgaagacctcatagtcgacaaagccaaggtcttctttatgggacgcttcgttaaagacggaatatccgtctccgccttcaccgacaaagttactggtggcgactctgtatgtcttcttatcagaaatcggctttacgctgccgtcatcctgtacggccgcagcttgaagaacgcggtgtcccggctttttattcagtgtaaacgtgtatgttaaaccggcaacttgagggaaggcgccgccttgagcctcaattccgcttaacccttgttccaaggcttgtttgatctgttttccggttaaatccgcgacgtaaagcgtgttgccgaacggcatcacattcagcacatcgccgagtgtgatgtctcctttatcaatgcccgcgcggatgccgcccccgtttgtgatcgcgatttgggcgtcggccgcttccttcgctttttgcagcatgccgtctgcgatgaagtttccgagattggtttctttggagcggacatgctcgcgctggccgtcaagtgcgacctttgttgagccgactttttcatttttgactgagacgagctcttttttaaacggatcaagctcttttttcagatccgggtcttctttcgtctgctcgttcaccggcagcgcctgaagagaggattgttccggcaggacgatgccgtttttgtcaaatgcgacatcgacacggcctaaatattcgccatattcttttgcctgggcgacgatggtcggctcttcgtttttgacaacttccattttatctacaagcgtatgcgtatgtccgccgacgatcaagtcgatgccttttacctttttggcaagatcgagatcacgctgatgcccgatatgggtcagggcgataattttattgacatgttccttgttctgtatttcttttaccgtatcttgtgcggattggaaggcatcatgaaagacaatgctttttcccgggcttgatgtgacggacgtatcttctgtcgttaagccgaatacggcgactttttctccgtttacatcaagcagaatgtatggatagatgcctgcttttttctttttccctgccgtaaatgtgtctgcttttttcatgaatggtctgagttttgactctttggacacatcgacatttgagctgacgagcggaaagtcaggcgcttgaaaattgtattttccggacgggtcagccgcgcttccgttccagctcaggaagctggcgagagcacccgggcctttatcaaactcatgatttccgaaagtcattgcgtcgtaacccatgctgttcatcaattttaaatcagccagcccctgccactttgtgaaatagagatcgcctgagaaaacgtctcccgcatccagcaaaatgctgcggtcggtttcgcttctgatttctttgattttcgtcatccgcctcgccgcgttatcaaggtgggcgtgcgtgtcgtttgtatgcataacggtgagtttccatgcgtcatctttcggcggatctgtgcccggttcatcatctttgaattggagcttgtactgtccgtagcccgcgttttgtgattcaccgatataggcgacgtcatctgcgcggtcggcaaacggctttgcggccaaggaagattcaaatgtcaggtttgtccctttgaccggaaggatggaccagttatgatcagcctgcggattaatcgttttctgctggatgatgtaatccattaagacctgcctgttctcatcggcagaagagtatacgattttatcattgcttaagtgagggaatcctccgccgcctgaagcgcggtaattatttgtgacgatcagaaattcctgcttggcgctgacgggctttccttgataagaaaggttgacgatccggcttgcatcgggatgaatgactgttccgttttcgttgtatttcgccggttttgtgacatcgacctgataggtgacaccgtcaatgacatcaaaattgtatgagcggtaggcgtcatttaaaagcgcttggctgccgccttttgcctgatcgatctgattaaattgccctgcggacatttcgagccagtccttcacttcgcttccgttcagcttgacgatctgaaccgtgttgtcatacaggtacaaatcgccgatatttttgatggcgaggtcgccagcggaaatgtttgtatagtagtttgagccgttccgcccgccggctttaaacggggcgcccgccgagaggataggcagatctttgtattccgtatccttcatcttattttcggcgtaccatttttgcgcatccgttacgatttgaatggacggatcatctttgacttgggcgaagaaactgttgatatcggcttttgtctggccgacgggttctctgatgtatttcaatgtgccttcgtgcgcttttttgacggtattgacgacggtttcgttttccgacgtcacattgccggcaatcggctcgatgctgccttttgcatcttccacatgccacgcgctgtctgttttttcaagccggaggtcgatgacgcccgcatatttgccccagctgcttgacatgacaacggggatgccgttaatcgtgcctttatcgacgtcaaattgatcagcgcctttgtattcggcatcagggaaaagcccgtgctgatggccggatacgatcgcatcaattccgctgactttcgttgccaggtcaaaaacggcgttttccgctccggaagactgcgcttttttttcgatgccgctgtgggcgagggcgatgacgatatcggctccttcagctttcattttcggaacggttttctttgcggattccacaatgtcttcgacctgaaggcggccttcgagatttttcttatcccacgtcatgatctggggaggaacaaatccgatgtagccgacttttatctgatgcttgccgccgttttcatccgtgacggttttgtcttttatgacataaggcgtataacggttttcgccgcttaatgttttcacattggcgttaacgatcggataatcagcgcctttgattgtcccgtccagaaattcaagcccgtaattaaattcatgattgccgagtgttcctgcgtcataatgcagactgttcatcacttcaatgatcggatgggtctttgcgcctgaaataatatcatttttctcatattttacggcgtattctccgaggggattcccctgaatcaggtctccgttatcgacaagcagcgtattcgggttttcgcgcctgtgcttctcaataagctgagccgttcgggccagcccgaattccgttgtcggtttgtcgctgtagtaatcgtagtccatcatgttagcgtgaacgtcagttgtggctaaaatgctgagattcacactggaggatttgttttcttctgctttaatgggtgatgttgggaggattagactaagtatcataactaggggcagcagaatacggagtgtcatattgacgctgcatcgtcttttctgtattctcacctgttctccacctttcaacaaattttgtcatgcagtaccattgtaagaatattttgtgaaagttcatatagatttcatgatgattcttgtaaaaagatgaaaaatgaggataatgacctatgtaaaacggatgagcggcaaacgcgttacctatgtttgatgttagtgtggctggggtacatggatttatgtagacttcatcaagcaggaggtagtaactatgggtaaaaaaattgcagttgtattaaccgattattttgaggatgtcgagtatactgaacctgcgaaagcttttaaagatgcgggtcatgaattaaccgtaattgaacaggaaaaaggaaaaacagtcaaaggcaaacaaggggaagcggaagtgaaagtggatgagtccatcgatgatgtaaatccgaaagactttgacgcattgctgatcccgggcggattctctcctgacatgctacgtgcggatgaccgtttcgtccaatttgccaaagcgtttatggatgataaaaaaccggtgttcgccatctgccacggacctcagcttctcatcaacgcgaaagcattggacgggcgcaaagcgacagggtttacatcaatccgaatcgacatggaaaacgcgggcgcgaatgttgtggatgaagaagtcgtcgtctgccagaaccagctggtcacaagccgcacaccggatgacataccggcattcaaccgcgaatcattaaaactgcttgcgtaatataaaagcggagcgccgtatcaggcgttccgctttttttgtgaagattcccggataaccagctcaggcgccagaataatgcgttgttttttgtgctgggaactggtgattttatgatgcagcaattgagccgcttcttttcccgactgccgcggaaaggaagaaacggttgtaagcgggggataagaaatttcagcttccggcacgttatcaaatccgacaatgtcaatatcttcgcccggaatgagcccggcttttctgatcccttgcatgacgccgaacgcgaccaaatcactgaagcagaatatcgcggtcgggcgctcagaccggcggaggagctccgtcacggcttcacagcctgcttcgcgggtcggcgcgctgtcaatgacatagtcattttttacttccagatccgcttcacggagcgcttttttaaaccctttcatacgcttcgtccatgttgatgagtgcttcacgccgcccagaaacgcaatctcctgatggcctttctcaatgaaatgacgcactgccttataggtgccttcctcataatcggctccgacaaaatcacagtcggcatcggcaatctccctgacggcgagcacgaccggaatgtcaagctgctcaaggcgggaaagggtttcctcagccgtacctgaaaccggacacaaaatcaatccgccgaccctgtgctccagcatggtcgagatcagctgctcctgcttggcgacggaatcaaatgtcgtgcctaacagcactgttaatccgacttcctcaagcgtattctgaacgccgatcagaaactctgagaaaaacgtattggaaatgtcagtaataatcaatcctaccgttgtggacgtctgtgatcgtaaattcgcggcgacccgatcatatacgtaccccagctcccgcatggattgcagcactttctcacgggtcgcttcggaaattcgcggattattgcggacgattaatgaagcggtggatgttgagacgccggcatgttcagcgacctgctgcaatgtcacccggcgttttttttgctgtttcatacgtcgcattcctcacttggtttttattcgttacatccattataagcgttttggcgcatgagaagaaagagagagggggagaaaatgacaaagcgccggaagacggattgtccttcggcgcttctgtcacaataggttattcaaacatttgctctttaatatactgaaccggcatttcacggcctgtccaatattcaaacgccatggcgccctgccaaagcatcatgccgaggccgttaatcgtgttgcagccggccgcttgagcttgttcaagcaatttcgacgtaacggggttgtaaacgacgtctgtcacaatcaaatccggacggagcatggatgtatcttcaatgacgctcaagccttcaagcggtttcatgccgacacctgttccgtttgtgaaaatatcgcttgaagcgatttcagcacgcagcgcatcttgatcttcgagcgggaagactttcgctttgcaagaagatcccttcatttcttcattgataatgcggacgttttcttccgctttttcgaaaaacgcgtcattgcgggcgaaaatagagatttctccgaggccttccaatgcggattgaatcgctatcggagtggcggccccgccggaaccgaccagcgtcatttttttgcccgtgatatcgatgccgtgttcttttaagttgcggacgtatcccataccgtcagtggagtgtccgatcagtctgccgttttcattaacgactgtatttaccgcgccggtgaatttcgctgaatccgcgagttcatcgaggtaagggagaatgttcatcttgttcggcatcgagacattgaagcctctgacgtttaaggcgcgcattcccgttaccacatcttccagctgttcattgccgacttcaaacgcgaggtaagcgtagttcaatcctaattttttaaacgccaggttgtgcatcgccggagataaagagtgtccgatcggtgtcgcgaataatccgataagctgagtttttccgttaatccgtcctaaatctttcttcatgatgtattcctccgttagtccattcatttgtttttcatcccgcttgagggcaaaaaacgctgattacatatgtttatttaaaatgctgagtacgctgcgcaattcttcaacgggaatctgtccgggcgctgatgcttctttgcccgcgccgaacgtgcacgctgagccgaagacttcgccggccaggcggctgatcagacctgttcccgccattgacatcgtgatgatcggccggtctgcgtattgtgttttcatcgtgtgagtggcatccaataagacgaaaacatcttcagtgctttgcggcatcaccgcgattttcggaatgtgcgcgccgtacgcctgcatgttccgcaaccgggaaatgatttcttcttttttcggtgtctgatgaaaatcatgattggacatgacgacatatacgccgttgtcttcagcggttttcacaattgatttgacttccgcttctcccgtaaacaactcaacgtctgcaaggtcaatgtgttttgtttcgatggcggttttaagcaattcaatgtaaaagcgatcatcaataactttatttccgccttctttatgagttctgaatgtgaaaagcagcggtgttgcgcctgcggctttccgcagcttttcaagcatgccttttacggcgtccaggctgtcaacgtgctcgtacacatccgcccgccactcaatgatatccgggcgaagcctgttgacggcttcaatttcttcgagcagttctttctctccgggcgccatcagcggcacaatgatcttcggaagcccttcgccgatgaccgtgtctctgatcgtgatagattgcatgataaatcctctcccttaaaaaatagtcaggctttcatcacttgcttaaagcggattccgataaacaatgcgagaagggcgctgacaaccgcaattccgatatcaagcagaaaaacaggcgtcaggccggccgctttggatatcgctcccgttacaagcggaatgacaataaaagataagcttgatgctatattaacaaaagatgtgatcgtacctttatttttagggaataaaacagccataaccgtcatcgccaattgcagaatgcccgcagttgaaagtccgatgacaaaggagctgatgactgatacggccggctgatgaatgaaaatcagagcaagcagcgcgattgccgcgatcacagggtacagcaccattaccgtaatcggctgaatcactctgtttaacagcacagccagcaataacacggacacaagcgcaccgatgctgtaatagctcagcaatttgacagcctgcacctcaggcatgcccaaaacggtttgcccgaacttaggaagccatacttgaacgagcataaacagcgccgtagatgaaaagcctaacagaatgatcgcaaggccttcgcgccatatcgacggctgtgatgtgaacgcgtcatcagacggagaagcttccgtccggccgccgtcttctttttgcttatgattcggaaacggaacttttaacaggaaaaagccgttcaggaagaaaataatgcccggtacgaaaaacgtccagccgtaaaacaaatgcctgtccgcaataaacgcgatgaaaaacggaagcaccgtcgcgccgatggatacaaacgctttgattaacacggttgcagagcttgcgtttttcggaaatccttcaataagcgccggatatgtcccggaatccaaaaaggaattggcgatccctgcgaaaatggcgaagataaacgcggccgtatagtttgtcgaaagcggaattccgattaggaaaatcagatacagaaaggcgcccgacacgataaacggccgtctcccgaatgtatccgaaagcttcccggcaaacagaagcgaaatcagcttcccgatcccgatggcggagaccaaatagctgatcccggctgcagatgtatgaagctgttttgataatgcctccatattggatgcgataataatattgatcatgcccagcaggaaataattaatataaagacccgctgccattttggtgtatatgtttttcatgatgacatcccctaatgcggttaataaagaattaaattaatttttaaattaacaaaagcacagaactattcccctttattgaaccactgcctttctttgaaaactggtttgataaaacggttgcagatacaaacttgaataacgctgatatcataacaagtatatcgttctactaaataaaaaaaagataagcggcccgctcatttagtatatcgttctaccaagttcacagttactatactccttctttttatatgtgtcaaaccgatgaacttttattttttacttttttaaatcaaaaaaagacccgccgtttttcggcaggtctgacatgggtttattttctgagagaggcgagctcctcggcaatggcctgcatttcactcgggctgaatgatgcttttttcatgaccatttgatgaaggtatgtaagatcttctattttttcatcactgaaatcttccgctctgatgacgccgacattgagcatgttgagcttttgcgaaatgtcttcaatcattttgtttaacgtttctgtttgttggctcggcaaattcatgcatcctttcatgaccgttttcgtaccctttattctaacagaattcatttagaataaaagcttatttccacagcagcagaaaagttgctaagatgatgataaggtttttgatcctaaaaatgcggggaaagaatagggaggttatcgatatgatacatgtgctgtttgtctgtctgggaaatatttgccggtcgcctatggcagaggcggtattttctgatatggtgaagaaaaacgggctgaacgggcagattaacattgattcagcgggaatcggcgcctggcatgcgggaaatccgccgcatgaagggacaaaggagatcctaaagaagaaagggatcagctcaagcggcatcacggcgaggcaggtgcgtgagtctgatctgaccgattttgattacgtcattgcgatggatgcagaaaatatcggacatctgcgcagcatggccggttataaaaaagcggcgccgcgtattgcaaggctgcttgattatgtaccggagtcggaccttgcggacgtgcccgatccgtattataccgggaatttcagcgaggtgtacgctttggtcgagtccgggtgccgtcatttgctggagacaataaagaaagaccatcatttataagggggattgaccgatgaagcagacacgcatcatggcaaaagcgattctgatcggcgctgccgccggcggagcactgtccttattacataagccgacaagagaggcatgtttccggaacatggacgcgtgcaggcagcgtgcggcattctaccgaaaacatcctgaagtgctgaaacagcaggcatctgcaaaacttgatcaagtgaagaccatcgccaataccgtatcggatgatctgagttttttaaacggccagatcactaagctgaagcagacgacaccgcaggtcattgacctgttaaaagaaacgaaggagcatttttcgaaaaacgatcattgaggtgggatgtcatgagttttataaaggagctgtttgcaaggttttctctccatgaaggacaaagtaaatcggcggagctggcgtattttttcctgctgtcattgtttccgttaatgattttcatgctgacgctcaccgcctatcttcccatatcggcagaagacgtgctcggggcggtcgatcaatacgcgcccgacagcgccatgtctatggtgaaatccataacggagcaaacgctgaacaagcgcagcggcgggcttttgtcattcgggattatcgccgtcatctggtcggcttcgaatggtatgaacgcgattgtcagagcatttaaccatgcctacgaagtcgaggaaaaccgctcatttatcatcattcgcctgacctcaatttttttaaccatcgcgatggtggttacgattttaatcgcattgcttctgccggtgttcggcagagaaatcggaatgctggccgcagatttcatcggcgcctccggcctgtttttgcaggtgtggtcggttgtccgctggggtatcagtccgcttatccttttaatcgtgtttaccgcgctttacattttcgcgccgaataaaaggctttccctccgttttgtactgccgggagccgtatttgcggcagccggctggattatcgtcagtatgctgttctcattttacgttggcacctttgccaactacagcgccacatacgggagcatcgggggaattatcgtccttatgatctggttttaccttacgggaacactgctgattttaggaggagaaatcaacgcgcttttacataaacgtaaaaagcttcctgatgaaaatccgtaccgcgggagcaagctatagaggaacggatgacgttcaagctgaataacggagggaaatcgattatgaccaagcatacgaaaaaaggcggaagccataataaacaaaactccaaaaacggcccgaagaataaaacaagcggaagcgctaacgggcagaacggataccactagaaagaagccgcctgacttagatcaggcggcttttttatgagtatggaaaagaatgggattcggatgcgggactgtgctttgttttcccgaagacgagcgcaagccaaatacagaccagaatcaccgtaataaagtaaaacaaattggcgctttcaaaccgctgcatataccagccgcccgccaccgggccgatcatgctgccgaggctgaaggaaatgccgcagagcagattgcccgccggcagcagatgggaaggcagcaggtcgctcatatagctgatgccgagggaaaacatactgccgaccgccattcccgccgtgaaaaagcagcagccgatgacagaaggcgagggaaacagtccggccgtcaaaaagcaaagggcacctgttaataaaatgacgagcaggacacgttttctcccgaatcgatcgcttaataaaccgagagggaactggaatacaatacttccgatggcaaaagcgggcaatatcagcgcgacggcatcgacggatatgcctaagcgcagggcgtacacgggaaagcttccgttcagcgccgtttctaaaaaaccgtatccgaaagccgggagaaaagcgacccagccgaaaagaagggcgcggtaaaaccgttttgcgctgttatccccggatgtttcatccggaccttgcgccgggtactcgttacgtaagacaaatacaaacagccaggcggcaagactgatacagccggatacgataaacggaagggacggacttgttttcacaagagggaccatgaacgggccgacagcgaatccgagcccgaaggacagtccgtacagcgaaatgtttcttcctctgtttcggggcgttgactttgacgtcacccacgtttgggttgaaaaatgcagcatatgatccccgattccgataagcagccgaagaaaaaaccataaccatatggattgaagccaaataaaactgaataagctgatgataacaagaaatccgcccatgaccatcagaggtttgaatccgagcttgcgcagcggggcctccataaacggcgacgccagaagcacgccgatataaaggccggttgcgtgaagtccgtttatagcggctgattccccgttcgtttcaaaaatgacggagatcacgggcagaagcatgccttgggaaaatccggagatggaaacaagcagaaccaaaataaagaagtacagtcgtgacatcgcgtatttctccttcttcagtatctttcttgatcgtacacggatttgtcgcgtccggcaacctgaaaatgccaattcgggctgccgcggaagtgtaattgagggagtttttgagaaggatataaaaagactcattcgaaaaaaggagccagcagatatgaatcggatttttttctttacggctgcggcgggagtgccgctttcagtcatcggcggcctgatgcactggccgtcagcggttttgtttattatttattgcttgacgattattgcgcttgcaagttatatggggagggcgactgaatctctcgccattatcgcgggaccgcggatcggcggtctgctgaatgccacgttcggcaatgcggtagagctgattatatcgcttttcgccctaaaagaagggctgacgggcatcgtgcttgcttcactgaccggttcggtgctcggcaatcttttgctcgtcgcgggattgtcgttttttatcggcggtttgaaatacaagcggcaggaattcaatattcatgatgcacggcataattccggattgctaatttttgccattatcgttgcttttgtcattcccgaagtgttttccatggatatgggggaaaaaaacaagcttgatttgagtgtcggcatcagcatcatcatgatccttttgtacgtggcagctctttatttcaagctcgtcacccaccgaggcgtttatcagccgaatcagccggaggcaaaggaagaagaggagcagcctgagtggtcggggaaaagagcgacagccgtcttatttatttcaaccattatcgtcgcctacatatctgaaaaccttgtccatacgtttcatgcggtggctgaacagtttggctggagcgagctgtttatcggagtgattatcgtcgcaatcgtcggaaatgccgcagagcatgcgtcggcgattattatggcgtacaaagacaagatggatgtcgccgttgaaatcgcggtaggctcgactttgcagatcgccatgtttgtggctccggttcttgtgatctgttccatcttttttccggtcaatatgccgcttgtattcacattgcccgagcttgtcgcgatgatctcatccgtccttttgatgacgatgatttcaaatgacggtgattcgaactggtttgaaggggctacgctccttgccgcttatgtcattatggcgatcggttttttcctgctttaacctgtaaaaaatgcggataacaacgattgcggaggaaaagactaaaggaaaatgctatagaaagagtgatatgatgagaaagctgtttcatgccacactgattctgctgttatcctttagttttttcgcaacgccgtctgccgctgcaaaaaaaccgtttaaggttcccaactctgtcgtaagcatttcaaaggaaaatacgtatccgaatgcttcacaggaccagccgatgcttcagccgagcaaactggcaaaggaattgttagatacatccgagatcaacatcgaaaatccacatctgataaagatgctgaatgaatcctcggtttccggttcaccgcttgccatcggataccgggcgacaatatttcttgggaaatgggcgctcggctatcagtcaaacgaaacggtcgccaactgggaatataaaaaaatcaacacaaacagagcggataaccggggcgggcagcaaaccgcggttatctcatacgcccaagaacagcaatacaaaatcaaaggcgggctcacagcgaaggtgccgaacgcagaagacgtaaaaagcatgatgatgcaaaaagcgatgaagaaaacaaaactgccgctcgcgtttgaaacggttatcggcgcaggcacaaaacgcgatcaaacctacaaaatttctccgcagcggctcggctacctgcacgcctacgctccggccgttaatgaaaaaggaaaagtaacatacggtgaagtgtatttggtgctgaaaggcagcaagcggaaacttgtcgtcaaaaatgtgacttcgcaaggaatcggggcttggattccggtgcaggatcacgtcacattcggttttcaaatgacagcgcagccgagataaatcaaaaaagctgattccggttcgggaatcagcttttttgtgtgtgatacatttcctcgagcaattgcacattgttgttgtacagctcccgggcaagaacgcgtctcaccgcaaggctcgccgagaagtattctgtgtcttgaaccatgcctttgacggtaaattctatgcctcttgtcaatttgttcaggctcatgattccatgcacttgaaacggctccgtcgcattgagaaattcatcccgcttcagtgaatcgcgaagctcatcattgagcatgtcgcaggctttttctaagacggcatagacccgctcgggatcttccttgtaactgatcacgacggactcggtaatccgcataaaatcaatgttatagttttgaagctgtctgacctcaccgttagatatggtaagcagcttgccggtccactcacggatctggagggaacggagtccgatttcttcgactgtgccgttgaacagattgttaatcgtcacgtaatcacctttatgaagctggcgttcgtatattaaaaagacaccggccaatatgtccttgattaacgactgggcgccgaaaccgatgacgataccggcaacacccgccccggctaaaattcggccgaaatcatgaacgaataaagaaatgacgtaaaagataaaaccgatcgtcgccgtatactgggtgatggaccggacgaggctttcaatcgttttccctttccgttcctccaagaaatccgtgcgtttaaataacacctggacaaagcggttgatcagaaaaacaccggcgtaaagcacgagagcgacgatgatgatctcaaccactttgcttttcaaaatgtctgtaattgtcgtttccatcttttgttaacctctggcttttcgtaatgaaaaatctgtgtcctgataataactgtttttgacaaggacgttcgggccgaggcaccggacgcttgtgcagcggcagttcagctctttgctcagcttcgtctgtctccacttgtcatatgcttcgggaaggctgtctgttttaatattgccgagcggcggtgtatcgccgaaatccgtgacaatgatatttccgtcaaaaatgttgacattcaggcgggagcggccgtcagggtcgtttcgcaccgttacgtttttcgcttcccgcaggcggcggaggagcttctggtcttcttcatcagggctgcatgcgtaaaacgggagcgtaccgaacagcatccatgtcccttcatcgcgaatgtcgagcagatgatgaatggcctgtctcatgtccttcaggctgagtgattcaagcgcgctggcgaaatcactcggatacatcggatggacttcgtgccgctggcatttcatttcttccgtaatctgccggtgaatatgttcaatatgcggcagcgtccgtttgttcagcatcgtttccgctgaaaccattacgcctgcttcgaccagcgtgcggctgttttcaatcattttgtcaaaatagcgcgcccgttgttcaaatgtcggtttcttctccatcatcgcaaatccgatgtcggcaaagtcctcgaccgttccccagttgtgagaaatgtgaaggacgtccaaataaggaataatccgttcgtagcgcccgatatcaagcgtcaggtttgaattgatctgtgtgcgcacgccgcgttcatgcgcatatttcaaaagcgggacgacgtattcctttaccgatttcagcgaaagcatcggttcgccgcccgtaatgctgatagagcgtaacagaggaatttcatcaagccgctttaagaaaaggtcgatcggcagcgcattcgggtctttcggctggagcgtgtacccgacggcgcagtgctcgcatctcatattgcacaaagtcgtcgttgtgaattcaacgttcgtcagtttcatatctccatactggtcgacatccatgtacgcttcccaaggatcgtactccggtgtgatcggacgcagtgttgtgttttgtgtcatgactatctaactcctttataaatggggcatactaacgtctgccaactgttaattttagacctgatctgccaagatcgcaagtagcggaaccattgaaaaacggcaaaaaatacgctaccattataaaaaatgaatggagtggaagtatggggaatgcagtaaacagcaaagatcagcagctcgattacctgaagaacagactcgatatgtttatgaatgtcattgattcattagaccctgaatcaacggacgttgaagatatagaccggctcatcggcatgcttgatgatctggaagcaaaatacgaacgctttaaaaaggattgggaataaaccccggcggatgccggggtttttctttttccataatgcggctgtataaaagggcagggcctactgcaaaataaggaaaaatgcagaaggagtgctggtcatgaaatggttttgttcaatttgctgcatggccgttttacttgcgggaggcatcaacagcgcagaagccgtgccgaatgaacggataaactggggctttaaacgcagcgtcaatcatcagccgccggatgccggcagacagctggacaatctggtcaaaaaatatgatgccttttatttgggtaatacgaaagaaaagaccatctatttaacgtttgataacggatatgaaaatgggtacaccccgaaagtgcttgatgtgttaaaaaaacatcacgtcacgggcactttttttgtcacgggtcattttgtgaaagagcagcctgatttgattaaacggatgtcaaaggaaggccatatcatcggcaatcattcttttcatcatcctgatctgacgacaaaaacgggcgatcagattcaagacgaactcgattctgtcacggaagctgtgtacaacattactggaaagcgggacaacctgtatctccgtccgccgcgcggcgtattcagcgaatatgtcctcaaagaaacgaagcgcctcggctaccaaaccgttttctggtccgtcgcatttgtcgactggaaggttaacgagcaaaaagggaaacaatacgcctatgatcacatgataaagcaggctcatcccggcgcgatctaccttctccacaccgtttcaaaggacaattcagaagctctggacgatgccattaccgatttgaaaaaagaaggctacacgtttaaaagcattgatgacctgatgtttgagaaagaaatgaagctgccgcgcctgtagaaaacacctctcctggtaatggagaggtgttttgttatttcaggcatttaatcaaagcggcccaatccagatccccgaagccttgtgcgatcccgctttcaaaatggctcttggccagttcggcaagagggagttttgcggaaacctgttctgcggcggcgagcgccagattggtatccttcagccctaaagacattttgaaaccggccggctcaaatttctcctcagccatgatcgtgccgtaattttgatagacgggagagccaaagagcgcgccggcgatttctaaaaattgtttttgttctaacccgtacttctccatcattaagaacgattcagataacgcctcaagcatggacacgagcaagaaattgatgctgattttcgcggcattggccgtttttgtttcttcaccagtatcaaatacttgctgactcaggatgttaagcagcggttcggcctttttcttcgcttccgccggtccggctgtgatgatgcgaagctcggccttctcggcggcatcggggcggccgaggacgggagcggcaataaaggactgtcctctgcccgaatgtgcggcggaaagctgttctgacagcgccgtactgatcgtgctcattgaaatatgaatgccgttttcagataacccggcaataatgccgcaagctccgaacgttacgtctattacggcgtcatcgtctgacagcatggacagcacgatgtccgcatgttcagctgcctgtcggggcgtttcggcatattctgcccctttatccagcaggtcagccgctttttctttcgtccggttatatacagtcagactgtatccggctttcataatattttcggcgatggggcggcccatattgccgagtccgacgatggcgatcttcatttgacagtccctccaatgaaaagttttccaccattatacatgcaaaatggttaatctgctgtgtacaggattgccactttcagttcaggttctgaagaccatccggagtctgaggcggctttccccttataaaatccggtaaatcgggttttgatgattgtttttgaacggggttttacagtgaacgtttttgatttgaatgtgacgtcctttatgttttctgataaatccggggtgacagaaatggtttgttccccttttccgtaatgattgatataaagcgtgcagctcatgcccgctctttttcgctcaaccagatgactgcattcgctgcggtgcttcaaatactcgacagcctctttttcgggcgcgaactgttttaaggaaaaaacggcatattcggtggcaggactgataccggaagcggcccccatactgagaaagatcagaaacagccccgccgcgggaagcgtccgcctgaacgcggcggcacaccagattaacgccgcaaagtaaagcacgaccccgggaatgacggagatatgggctccatcttccggccaagaggaaaagccgagtaactcaaagatgtaatcagacaccgtacggccgttatacagcggggcaatggacatgacactgaaagccaggaggacagaagaaatgattttgtgagaaaggatggtaacggcgcacacctctttacgtttttttccagactatcatgttttctcaaaaaaaagaacagccggcagccgttcttacttgaaaatattaaaccagcctttgcgggcgaaccaaaacagcatggcggccacaagaacggccattacgcccaaaacgataaaatacccgtatttccaatgaagctcaggcatgttatcgaaattcatgccgtaaacccctgcgatgaacgtcagcggaataaaaatggtcgagacgatggttaatgtcatcataatggcgttcatccggtttgaattcagcgtcacatagctgtcccgcaaatctgatgtcatatcacggtttgactcgatcagctcagccagttttaacaggtggtcataaatatcgctgaaatacgctttcgtttcacggctttcttttacatggtcaaggctcaaaatccggtacattaaatcgcgcatcggaatgatcgtccgcctcaggttcaaaagatcagtccgcaattcaaacacttcattcattaaagtgccgtaagatttatgggttctgctgtcttcaatttcattcagccggtcttcaattttgtacagcacggggaaatattcatcgacaagctgatccataatcatataagtgatgtgcccgggcccttttttggctactcccggagaagcgaaaaaccgttctctcacctttgagacgccgggcgattcgtgcaaatggaagctgacgatgaaacggtcggactgaaaaatgtccacctcttccatttccagtgtgtccgggttcaaggcttggagcacataaaaacggtagccgtcataatggtcgattttcggccgctgcatatgctgaaagcaatcctcgatcgcaagcggatgaaagtgaaaataatcacgcagcagctcggtttcatgcatctcagcgccgaaaaaatcaatccagtaccatgcgatgtccggttgttctgtacgtgatagggggatattatctaatatctcattatgtgttgtgattgcggttatatgtatcataaacaaccctccgcctgccattatatcatgcggcgttatgaagaaaagtatacgaattgccgcccggctgcttcatgatatacttggacaaaaaggggtggagcatatgtgggaggaaacggtttcggtcacaccgccgtatcattttgataaagtccttgaaaggctgtcgctcgatccgctgaatgcggtcgatcttcatgcaagatcaatcaaagtgccgctcagaacacgggacggcaaactgtccgtcatcacggttcaagcggaaggcaccgccgcagacccggtctttctcgtcagcggagaaacggaccgcgaggagatgattgaacggatcaaacacatttttcagtgggagcagccgcttcagcctgtgcttgatcatttctcaaaaacaaatctgtcggcgctttttgaggagcatgcgggaaccccgctcgttttggaatatgacgtctacaactgtctcatgaaatgcatcatccaccagcagctcaacctgtccttcgcttttactttaacggaacggttcgtccatgccttcggtgaacaaaaagacggcgtctggtgctatcccgagccgaaaacgatcgcggggcttgagtatcaggacttgcgggagctccagttcagcatgagaaaagcggaatatgcgattgacatttcacggatgattgcagaaggagcgctcaatctggcggaacttacccatttgtcggatgaagacattatgaaaaagctgatcgccatcagaggcatcggcccgtggaccgtccaaaacgtcctcatgttcggcctcggccgcccgaatctgtttcctttggcggacatcggcctgcaaaacgccgtcaaacgccgcttcgcccttgaggataaaccgtcaaaagacgtgatgctccaggtaagcagcgaatgggcgccgtatttaagctatgcgtccttgtacttgtggagaagtattgaatgatgaggatttttggaaacttccagtgaaaaacatgaaggaaccgccggctgcatgttatactgaaaagatgtgatatttcaaatcagccgttttcccatgagaaaggctttatatagaaacggagagaaaaaaacgtgaatcaacatcaaaaaaaggcgcctgccgaattgaaaatcggacagacatttccgctgaccatcaaacgtctcggcattaacggagagggcgtcggctattttaagaaaaaagttgtcttcgttcccggcgctctgcccggtgaagaagtcgttgccgaagcgacaaatgtgcagccgaaattttcagaagcacgcgtcaaaaaaatccgcaagccgtctgaacaccgcgtcacgccgccatgcccggtctatgaccagtgcggcggctgtcagcttcagcatctggcatacacccagcagcttcgcgaaaaacgcgacatcgtcattcagtctctggaacgtcatacgagattcaatgtcgaagaaatgaacattaaagatacgatcggaatggacaacccttggaattaccggaacaaaagccagttccaagtcggacgctcgcaaagcggcagcatcattgccggcttatacggactggattcccataaaatcgttccgattaaggaatgcattgtccagcatccggcgacaaacaaaacaacgggtatcgtccgccgtattttggaaaaacacaacgtatccgtttataacgaacggaccaaaaaaggcgatgtccgcaccatcgtgacgagagtcggttttgaaacaggcgaagtgcaggtcgtgcttgtcaccgcgaaagagacactgccgaataaagacgagatcgtcaaagccattcaaaaccgtctgccggaagtgaaatcgattattcaaaacgtcaacggcgcgcgcacatccgtcattttcggtgacaaaacaaaagcgctggccggaagccatgccattcaagaagtgctcggtgacgtgtcatttgaactgagcgcccgcgccttcttccagctcaaccctgagcagacggtcaagctgtatgatgaagtgaaacaagcggctcagctgacaggaaaagaaaaagtcgtagacgcgtattgcggcgtcggtacgatcggcatgtgggtttcaaacggcgcaaaagagatccgcggcatggacgtcattaaagaatcaattgatgatgcgaagaaaaacgccaaaaaacacggcatcaaaaacgcggcatatgtcacaggaacagccgaacactggctcccgaaatggacgaaagaaggcttccgccctgacgtggtcatcgtcgacccgccgagaaccggctgtgacagaacatttttagataccatcaaaaaagtaaaaccgaaacgcttcgtctacgtatcctgcaatccttccacactggcgaaagacttgcagacgctgtcgaaggactatcgcgtcgaatatattcagcctgttgatatgtttccgcagacggctcatgtggaagccgtggcgaagcttgtattaaaatcgtctaactaaaataaacaattcgtaatcagacctggatttcggtaaattaaacatttccgatttccgggtttttttatgttttgtgcccttgtcctatctgtcttttgtctttatttaactgataaaaagagttgaaaaaaacgtatggaaaagcaagtgaaaaacagccaagtaggctgcttcactttctttttttcgtttggaaacggcattacagacaaaatatgaagatcttgttgtgaaccagaagcaataacaagtcgttcatgttccgtgaatacttgtaatctcagttaatattttgtaaacttctttcttaaagaataaagtccccgacactcatcggcacttctactattggcgatagttgtaataaatgataaaaaggaggtgaaaccgaatgagagatattggaacctcaaccactgaacgaaggttctgaagcagaaggtgtaaaaggcaaggttgcttacttacactaatcacaacggcagttggaacatctactattagcaacaactgtggataaaagatcaaacacactaaaaaagcatgtttggtcgttatacatgatatgaaagcctaaacaggaaaaaaggaccccgattattttccttattcccaaagaagaaataaatccgaggcggaaacgcaagtgataacaactattacagtaatacctgcaatggttatatccttaataagcaattattgcgacaatcatgcttcataatataaagattatagattgacacttggctaaaaagtattgcagaaaaggaaacggataatgaaatggataaagtaaacaaaaaacgaccgttatttaaaagaagttggtttcaaacgttgttggcatttttagtttcacagctttattttaattttgcagaattaacgggatggggtcctaattatagagaaatgaatggattcccagcaaacatagttgagctggatttctttcaaacatatctttcattctatgataatccatggtttaatattgtcactgttttcttgggggttttcactgttatacaaatcatcacaggtataacaaaggatattcgaaatgaaagcaataacttctgatgccttatttaatgatgaaagaaaatgaacacttttttattaatcttatgaatgagactgcggcacttagtcagcagtctattttattggttttggatcaggattaccgaatcgtaaccttatacaaacatttatagatgattactgtggcaccttataaatgtaattatttattttttttatgcagatattttgtttataagtaataactttaaaactaaaacgttataaagatattgacatatggacaattattttgcattggtaatagggagaactcatatgatattctatttaggttggaatccttttatccaaaaagagcaaaagtaaggccgctaagaaagacgaaggtcagcgctactattaataaaccacaatataaataaaaaaataggtgtagataatcatcacacttttttctctctcaaacccttttaaaggttaaggagttggctgagttgatcagaaatgaacgatatggggttaactatagcgatagtctattacgttaactcaattaaggcgttctgcttcagtttgctttttcacttttttacgtgtaaaaagtgaaatgttcaaaatttactatcgtttgataagaagtgctgacacatgctataagtgtaaaagaagcatggtcagtttttaattttgggataaaggtttggctgtatcccatcatgaaaggatttggatttgttatgacagataatttctggcgtgaattaccacggccattttttgtactggcaccaatggaagatgtgacggatgtcgtttttcgccatgttgtgagtgaagcaggcagacctgatgtgtttttcacagagtttacaaactcagaaagctattgtcacccggatgggaaggatagtgtgcgcggccgtttgactttcacggaggatgaacagccgatggttgcccacatatggggagataagcctgaaaactttcgccaaatgagtattgggatggcggaattagggtttaagggcctggatatcaatatgggctgtcctgtacctaatgtggcggggaatggaaaggggagcggcctgatttgccgtcctgaagttgcagccgaattaatacaggcggcgaaagcaggaggtctgccggtaagtgtgaagaccagacttggctacacggatatagacgaatggcgcggctggctgacacacatactgaaacaagacattgcgaatctttccattcatctgcgtacaagagcggaaatgagtaaagtagatgcgcattgggagctcatcccggaaatcaagaaacttcgtgatgagatagcgccggataccctattgacgatcaatggggatattcctgaccgtgaaaccggcttgaaactcgctgaacaatacggtgttgacgggattatgattggacgaggcatttttactaatccattcgcctttgaaaaggagccgagagagcatagcagtaaggaattgcttgatcttttgagattgcacctggatcttcatgatgaatattcaaaagcagaagctcgagcatataaaccgctcccccgctttttcaagatatatctccgcggattccgtggagcaagtgaattaagaaatcaatgcatgaatacaaagtcaacagatgaagtgcgtgcattgctcgatgactttgagagaaagtatcttgatgggatggagcaagagtgacataaataactcttcatccggcccggatttcggtttgaattccgggtctttttgtgtgcagtttttacccagacagatccatggccagtttcgtcatgcagaaataaacgaatcatggtacattgataggacatacatcataaaggggagagaaaaatgaaacgactgtgcatcatcccctgcggcaagaaaaaaatttgggatgtccattcagatacaggtccggtaagggcggaagacgcttatctcagcccgtttcatcaggcgtgcgagcgatatgcgaaagcatttttcgatgagtgggtaattttgtcggcaaagcacggattccttcgtccggatgatatggttcccggaaattacgatgtcacttttggaaccggtcatccggagatcatggcagcggacgagctgcgccgtcaatttcatgaaaaaggcttttccgacatcgaagagtttatcatgcttggcgggaaaaaataccgaagcgtcctaaacgccgtcatcggagagcatcagcatatcacctggcctttgtcatcgtataaaggcattggctacatgcttcaagcgctgaatcgggctgttgaagaaaagcatgaactgcagcacgcggatatgaaaaaaaagagtgtaaccactcaaacgccgcgatagactgtatgcaaaagaatgaagcagttaaaagatttccgaggaaataaatacgtcgatcattgtcaaagacagggtgatgcccggtcttttttgtatgccataaaacgagacaaagggaacagatcgagacaaaatgagacacctgtctcaaactgtctccattgtaaaaataaaaacattcattttacgggcttcaaaggctggcatgcttcttgcatttataagtgtgaaccctaaatagaaggaggcgcacaaaatggaattgttaaaacgagaaggcttgtcattaactgaggagaaagcgctgtggatgtaccaaaagatgctggaaatcaggggctttgaagacaaagtgcatgaactgttcgcgcaaggagtgcttcccggattcgtccatttgtatgccggtgaagaagcggtagctgcgggggtgtgcgctcatttagatgatggcgacagcattacaagcacacacaggggacatggccattgtatcgccaaaggttgtgatctggacggcatgatggcggaaatattcggaaaagcgaccggactgtgtaaaggcaaaggcggttctatgcacattgcggatcttgataaaggcatgttaggcgcaaatggaatcgtcgggggcggattcacgctcgcatgcggatcagcgctcacggctaaatataaacaaactaaaaatgtaagcgtttgcttttttggggacggagccaataaccaagggaccttccatgaagggctgaacttagcggcagtatggaatcttcctgtcgtgttcatcgccgaaaacaacggttacggcgaagccacgacatttgagtacgcatcagcctgtgattcaatcgccgatcgggcggctgcctacaacatgccgggggtcacggtggacggaaaagatattttagcagtttatcaggcagccggggaagcgatagaaagagcaagaaacggcggaggcccgtctttgattgaatgtatgacttacagaaactacggacatttcgaaggggatgcccaaacttataaaacaaaggatgaaaagactgagcatcttgaagaaaaggatgccatccaaggctttaaaaactatcttctaaaagaaacagatgcaaataaactgtcagacatcgaacagcgtgtcagcgaatcgattgaaaaagccgtctcgttcagcgaaaagagtccatatccgaaagagtcagagctgttgacagacgtctacgtgtcatatgaaaaagggggaatgtgagatggcgagagtcataagcatgtcggacgcgctcaatgaagcaatgaagcttgcgatgagaaaagacgaaaatgtgcttgtaatcggtgaagatgtcgccgggggagcggcggtcgatcacttgcaagatgatgaagcatggggcggtgtactgggggtcacaaaggggctcgtacaggaattcggcagaagcagggtgctggacacaccaatttctgaggcgggctacatgggtgcggccatggctgcggcatccacggggctgagaccgattgcggaactgatgtttaacgattttatcggaacgtgctttgaccaagtgatcaaccaaggggcgaaattccgctatatgttcggcggtaaagcgcaagtgccgatcaccgtccgcaccacatacggagccgggttccgggcagccgctcagcattcgcaggcgctgtatggcctgttcacgagcatccctggactgaagacagttgttccatccaatccgtatgacgccaaaggtttgctgctttcggcaatagaagacaatgatccggtattcttttttgaagataaaacgtcctacaacatgaagggcgaggtgccggaagattattatacaattccgctcggaaaagcggatatcaaacgcgaaggcagcgacatcacactgtttgcggtcggcaagcaggtcaatactgcgcttgaagcggctgcgcagctttctgagaaaggcatcgacgccgaggtgcttgatccccggagtctgtctcctttagatgaggaagcgattttcacatcgttagaaaaaacaaaccggctgatcatcattgacgaagccaatccgcgctgcagcatcgccacggatattgctgcgattgtcgccgataagggctttgatttgcttgatgcgccgattaagcggattacagcgccgcatacaccagtgccgttttcgccggtgcttgaagatcaatatttgccgacaccagaccaaattgtcagcgtcacgcttgaattgcttggcgagccggcaatgaattaaaggagggatatagaatggctgtaaaagtagtaatgccgaagctgggaatggcgatgaagaaaggtgaagtatccgtctggaataaaaaagtcggcgacccggttgaaaagggagaaagcatcgccagcatcaactcggaaaaaatagaaatggaaatagaagcgcctgaaagcggcacgcttctccatattaaagtcaaagagggagaaggagtcccgccgggaacgcccatctgttatatcggggaaaacggcgaagaagtgcgggagaaggaggcgccggctcctgaaaatgcagggaaaccgcaatctgaacctgaacatattcccgctcccaaagccgggcaaaagcgtaaacaccgcgtgaaaatatctcccgttgcccgaaaaatggcggagaaagccgggttgaaagttgaaacgctgaacgggacggggcccggaggcagaatcgtaaaagctgacgtcatcaaggccatgaagacggaagctgaaccgcagtcttcggttcagacggcacagccggagggaaaaccggcttcagcgatgagaaaagtgattgcagaccgaatgcacaaaagcctgcaaaacagcgcccagctgacgctgacgatgaaagcggacattacggagcttgtaaaatggcagcagcagctcgccgacagcgcgaaaaagcggagcggtgttaaactgacggtcacacatttcgtatcccgggccgcggtgcttgcgctgaaacagcatcctgagctgaacagctcttatcaagaggagcggatcatcacctatccatatgtccacctcgggatggcggtttctcttgaaaacggtctcgttgtgccggtgattcgggatgcggaaaagctttcattccttgagcttgcggatcacatcagcacatcggcacgccgggcgcgggaaggcaatgcttccggagatgacctgcacggatcgacattttctattacaaatctcgggggttatggaattgagcatttcaccccgattcttaatccgcctgaagccggtattctcggagtaggcgcaagctatgaaacgcctgcgtttaaaggagatgagcttgtcaaaagcaccatgctgccgctgagctttacctttgaccacagagtatgtgacggcgcaccggctgcggacttcctgaaaacggtcaaagcgctgcttgaagagccggccggattgattttatagagagggtgaagagattgacactagccattatcggcggcgggcctgccggatatgcagctgccgtgactgccgcgcggaggggagaagaagtcgttctgatcgacaaagggccgctcggaggcacttgtctcaatgaggggtgcatcccgacaaagtcgcttttggaaagcgcgaatgtgctcgataaaatcaggcacgcagatacattcggcatcgaactgccgcaaaacattacactcaattgggcccgcatgcaggggcgcaaacggcaaatcgtcagccagctcgtgcagggaattcaatacttaatgaaagcaaatcagattaaagtcatcagcgggacagcttcatttctcacagagcagacattgcttgttgaaggagaaggaggcgcaaaagacattctggaagcggatcggatattgattgcatccggatctgaaccggcggagctgccgtttgccccatttgacggcgattgggtgatcgacagcaaagacgcgctttctttacagcaaattccttcttctctgcttattgtcgggggaggtgtgatcggctgtgaatttgcctctttattcagccggtttaaaacgaaagtgacggtgattgaatcggctgaccggctgctcccggcagaagacggagaaattgccgccgttttcgaagactctttaagagacagcggggctgatattcagacgaaagccgcccttcagcggattgacaaagaaaggaaaaccgccgtgtggacaaaagacggcaaagaaattgaggctcaggctgatcacgttttggttgcaatcgggagaaaaccgcgtttgcaaggcctgaatctggagcaggccggcatccggtattctccgcgcggtattgaagtcaatgaccatatgcagaccaatgtgcctcatatatacgcgtgcggcgatgcggccggaggaatgcagctcgcgcatgccgccattcatgaaggaatcacagccgccgcgcatgcctcgggaaaggacagcaaagtcaatatgcgggcggtgccccgctgtatttatacatcgccggaaatggccgctgtcggactgacggaaacacaggcgagagagacatacggagatgtgaaaatcggagaatgctcattttctgctaacggaaaagcgttaataaagcatcagcatggcggcaaaatgaaaatcattgccgaaccggaattcggagaaatcgtcggcgtgtcaatgatcgggccggacgtgacagaattgatcggtcaggcggtcatgatgatgaacggtgaaatgacggctgatatgtcggagcactttatcgcggcgcatccgactctgtcagaaacgcttcaggaagccctgctgaatgtcaccggacttgcggtgcattccgtataaccggaataccctttctcagatgagaaggggtatttttcgttgaaagcgctttatttttaccctacaatatatgaaaagatggtctgaacaggggggagcgaatacaatgaatgtcattcggaatgattttaaaacctggaagcgttttgtgaaagaaggcgtgctcgatgaatcccgtattcagaagcgggtggccgcctcatggcaccgctgcaaaaaagccgacgtcaacccttatctcgaaaaggggccgaatgtgatgccggcagatcatttagaaagacaggccgaaaagcatgcgttatttttagcggcctcaacgccgtatgcagaaagaatgaaaacggcgatgcgggaaatggaaatgatggttctcctgattgattcagacggcgttgtccattcagttgacggccacccgcgcaccattcatgaagcgaaccgcatcaatttcttaaaaggcgcccgctggacggaaacggccgtcggcacgaatgcgatcgggacggctctttatacaaatgagccggtcatgatacacggttccgaacattattcgctcgcttctcatcaatggagctgttccgccgcgccgatccgttatgaagacgggcggctggcgggtgtcattgatatttcctgccccgccgcccgcgctcagccgtttatgctcggaattgcctcctccatcgcttatacggcggaacgggagcttgccctaaagatcaaaatgacagaacttgacatgatcagcaagttcgccgggcttacccggtctcacgatccgatcgtgctttgcaatgaaatgagccgggttatcgccgcaagccgtcccgttcagcattttaccggacatacgctgcgcgggcttgaggaacatggctatcacatcaagcaggcgaagcgggaggagaacggctacacatgcgtttatttatccaaacgagaagaaaagccgtcttttatattccatggtgcggcaggcaaaagcccgtcatcccgacatatgcttcagcagctggagcttgtcgcccgaacggacgcaaccgtttgtcttacgggagaaaccgggacgggaaaggaggttgccgcccgggcgattcataacaacagctccaggaaaaacggcccgtttatcgccgtcaattgcggagcggtccccgaaaagctgattgaaagcgaactgttcggctactcggaaggcgccttcaccggggccaaacggaaaggacataacggtgctttgcaaaaagccgataaaggcacgcttttcctcgatgaaatcggagaaatatcacactccatgcaggtcgctctgttacgggtgctgcaggaacggaaagtcaccccggtcggcgggacaaaagagattcccgttgacatcagaatcatcactgccacccacactgatctgagacagcttgtcgaatgcaaaaagctgagagaagatttattttaccggcttcacgtctgtccgatccacctccctccattaagagaacgcaccgaagacattcccggcctcttccttgaatttcagcgaaatcgcggctggcggggggagcttcctgatgactttttagacctattaaagagccggaaatggccggggaatatcagggaattgtttaatgtatttgaacgtctttccgtcatgttcccggacggacggctgtcagaacgccccatcgcagccctgcttgaagcgtcaggtcttaaagaggcggccgagtcttatgaacaggaagaagcgtcccctgtctccatccgggagcacattcagaaaaacatcatcgtaaacgcccttgaatcagcgaaggggaatgtcacgctggccgccaaaatggccggaatcccgcggagcacgttttacaaacgcctcaaaaaattcaaactcaccaccggacaattgtaagaaacaagcatacttctcttggctgccggacacgttatgtgtgaggcctaaaggaggtttgagacgtgaatacacagcgtgcgaaagacatttcggaatccgccgccatggcgtatgtgacgtacgaaggagttccgatttatattcagcatgtcaacgaagacaaggaaacagccagaatttttccgatcggaaatccgcaatttgagcaggaagtgctgctttctgatttacaagagcatttttgagaatgggtctgctgatgacagcaggcctttttcgtacctgtgggaactttcccgctttttgagaaaaataactaaaattgattaaatgatctaactcctccaaacccggtacagatcggaccttctcatgatataaataaaatgtaaacgttatcagaggagggcttcacatgacagacaaatcattctcaatcgttattgcaggcggcggcagcacatttacccccggaattgtattaatgcttttgaatcacctggaagagtttccgatcagaaagctgaaactttatgacaatgataaagaaaggcaggagcggattgcgggtgcgtgtgaggtatttataaaagaaaaagcgccgaacattgaatttctggcgactgatgacccagagacggcttttacggatgttgacttcgtcatggcgcatatccgcgtcggaaaatatgcgatgcgcgcgcttgatgaacaaatcccgctgaagtacggcgtggtcggccaggaaacatgcgggccgggcggaatcgcatacggcatgcgctctatcggcggtgttctggagattcttgattatatggaaacgtactcgcccgacgcatggatgctgaattactccaatccggcggcgattgtggccgaagctacacggcgcctcagaccgaattcaaaaatattgaacatctgcgacatgccggtcggaattgaggatcgcatggcgaacatcctcggattatcttcacgaaaagaaatgaacgtccgttactacggtctaaatcactttggctggtggacgtccatcacagaccggcatggcaatgatttaatgccgaagctgaaagagcatgtccgtgaatacggctacgttccgaagacggaggccgaacagactgaagcaagctggaatgacacattcaaaaaagcgcgcgacgtacaggcggctgatccggatacgcttccgaacacatatctgcaatattacttattcccggatgatatggtgaaaaaatcaaatccgaaccatacgagagccaacgaagtcatggaagggcgggaagctttcattttcagccaatgcgatatgattacgcgcgaacaatcgtcggagaacagtgaaattaaaattgatgatcatgcttcctatatcgtcgaccttgcccgggccatcgcttacaacacaggggagaggatgctgttaatcgttgaaaataacggcgcgatcgcaaactttgatccgtcagccatggttgagattccttgtctcgtaggctcaaacggaccggaaccgctctcagtcgggaacataccgcaatttcaaaaaggcctgatggaacagcaggtgtctgtcgaaaaactgacggctgaagcgtgggaagagcggtcatttcaaaagctgtggcaggcgctgatcctgtcaaaaacagtgccgaacgcccgtgtggcaagactgattcttgaagatctgatggaggctaacaaggactactggcctgagcttgatgtaagtccgtctcctatttcctgatgacaatcttccccgttttctttatctgttattctatataatagaaagaaaacggggggatttttgggatgagtcttgaagaactggttaatcagcattacgcgaaattaaatgacaacgatttttatattttaaaatatatattgaatcataaacatacgtgctaccatctcggtatcaatgacatggcgaaagcctgcaatgtctctcggtcttccatcctgcggctcgcccaaaaactgggcttcagcggctacagtgaattccgtgtttttctgaaatgggaggatcagcctgaagagggcgagaatatgacgtttgaaaagctgctggatgatattgaagccaatgtaaaatacgtgaagtcaaaagatatgacggagatgtgccggctgatagatgaagcaaaacggattttcgtttacggatcggggacggctcagagggtgtgcgcccgtgagctgcagcggatgtttgtatcccggcggaagtatctgattttaattcaggacatcacagagtttgatatcatgtgtgatgattttaaggttgatgacgtattcatcattatttctttatcaggcgaaacacccgaattaattccgcaggtaaggaccctgtccgcaaagggagttccgtttatttcaatcaccaatctgaaaaacaacgtactggcgcaaacgacgccgtataatctttatgcgaccagcaagccggtgacgttaagcgataaaacggaaatcgtcgcatttgccccgttttttctggtgggcgaagcgttattccgcgcatatgttgattataaagagctcgaaaattttgataaatagcgggaggtcacgtgaaatgatgcaaaaagtccagcgcttcggcagcgcgatgtttgtgcctgttttattatttgcattttccggtattattgtcggtctgagtacgctgtttaaaaataaaacgctgatggggccgctggctgatcctgacgggctttggtatcaatgctggtacgtcattgaacagggcggctggaccgtctttaaccaaatgccgctcctgtttgcgatcggcatacctgtcgccttagcgaaaaaagcgcaggcgcgggcctgtttggaagcgcttacagtttatctgacattcaattactttatcaatgcgattctgacggtttggggcggggcttttcacgtcgatatgaatcaggaagccggcggaacgagcgggctgacgatgatcgccggcatcaaaacgcttgatacgaatattatcggcgccatctttatttcatctattgtcgtgtatttgcacaatcgttattttgataaaaaactgccggatttcctggggatttttcaaggatcttcctacatcgttatcatttctttcttcattatgataccgatttcacttgcggtggcatacgtgtggccgatggttcagtccggaatcggctcgctgcaaagttttctcgtttcttccggggcgatcggcgtgtggatttacacgttcctggagcggattttaattccgaccggcctgcatcattttatttactcgccgtttatttacggtccggctgtggctgaaggcggtatcgtcacctattgggcgcagcatctcggggaatactctcaaagcgtcaaaccgctgaaagaattgttcccgcaggggggattcgcgcttcacggcaactcgaaaatctttggcattccgggaatcgcgctcgctttttacgccacggcttcaaaggagaagaaaaaaatcgtcgccggcctattgatcccggtcaccttgacgtccattgtcgcgggaattacagagccgattgaatttacattcctttttatctctccgtttttatttgcggttcatgctttgcttgccgcttccatggcaaccgtcatgtatatggccggcgtcgtcggaaatatgggaggcggtttgatcgaagctgcgaccttgaactggatcccgctggcgtcaagccacggcttgacgtatgtataccagatcatcatcgggttgtgttttaccgctgtttactttttcgtcttccgtttcctcattctcaaattcaacatcgccacaccgggcagagaaaaagaggaagggcaggaaacaaagctctattcgaaaaaggagtacagagaacggaagcaggcttcaaaagaaacagcggcggcagacgaaacacagcgggatacagccgctttgtatattgaagcgctgggcggaaaggacaatattacggaggtcaccaattgcgccacccgtctccgcgtcactgtcgctgatgaatcaaaggtcaaaagtgacgccgatttcagagagctgggagcccacggcgtcgtcagaaaaggcagggcgcttcaggtcattgtcggattaggcgttccgcaaatgcgggagcgcattgaacagcaattggatcaataaggtcaaaaccttccctccccgggaaggttttatctttttcgcagattattgaaaaaacggcataccaaatttctttattcatttgccggaaaggcataaaataataatattgaacaaaggatttggaggcttacacatgtcaaaggctttatcatatgtaaaaccgtattctcttttggcgggaatcgctctgtttttcatgctcatcgagcttgcggtagagctgatacagcccctgctgatcgggaaaatcattgacgaaggaattttaaagcaggatctcggtacggtttggctgtggggcggcgtgatgatcggactgaccgctgtttcattcgcatcgggcattttaaattcattctactccgcccacatcagccagagctatgcgtatgatacgcgaaaagggctttttcaaaaaattcaatccttctcttattcgacgtttgcgcaattctcatccacatcgtttatcacccggctgacaaacgatgtgacacaggtccaaaatatgcttttcatgagtctccggtttatgcttcgtgcgccgttaatgatcgcgggcggcattattctctcgctgaccgtcaatgcgaaactcgggttttttctgctgattacggtgccgattttgcttttgtttttgctgtgggtgctgaaaagaggcggcgcgctgtttcggtctgtgcaaaagcggcttgatcaggtcaacacgatcatgcaggaaaacctgacggcgatcaaactgattaaagcgctcctccgtgcaaaccacgaagtgaaacgttttttgaaatcgaatacgaagctgatggaaaaaacggtctccgcttttcgtctcgtggaagcggcgatgccgattttaatgctgctgatgaacatttgcattttgtttatcttatggttcggcgccaaaagcattgctcagggcggagcgcaggtcggagatgtcgtttccgtcattaactatgcgacgcggattacaggcgcgctgtccgtccttccatttctcattatggtattttcccgggcgaaggcttccggggaaagaatcggcgaggtgctggaaacagaaggcggcgagggaacggggcaggacccggcacgggcgcttgcaggcgggattgagtttcgcgaagtgtccttccgctatccgggcatggaaaaagacgcgctgcatcacgtgtccttttctgccagcccgaaagaaacggttgccattatgggcgcgacaggctcaggaaaatcaacgctttttcagctgattccgcgcctgtacacggctgattcgggcagtattttcatagacggcaaaccgatcggtgaattctccgcttgcgggctgcgcagggaaatcggctatgttccgcaggaagtgcttctgttttcgggcacaatccgtgaaaatatcgcctgggggcgggaggatgcttcactagatgaagtaatggaagcggccaaagacgcgcaaatccatgaaacgattatgaagctgtcaaacgggtatgacacggtgctgggacagcggggtgtcaatttgtcaggcgggcagaagcagcggatgtccatcgcacgcgcttttatcagaaagccgtccctcctgctgttagatgacagtacgagcgcgctggatcttcagacggaagcgaagcttttacaagcgatcagatcctatgaatgcacgacacttattattacgcagaaaataacgactgcaatgaaggctgacaccatcttattgcttgaagacggcgaactgctggccaaaggcacgcacaaagagctgatggcacagtctcatctgtaccggcagatttatgaatcacaattcggaaaggagggagctgacaatgcaaaaagacattcgtaaacctttccgatatccgaaaataccgctcaaaccaaatgaaggcggcagaaaacgtgcgaaagcaaaagatacaaaaggcacgctgcgcagaatctggtcttatgtagccgagaaaaaagggcttttaacccttgtgatcatcatggtagtcataagcgccatattcggcctgctcggaccgttcgtcatcgggaaagcgattgatcattttatcgtcggacagacgacagacggattggcgggggtgctgttcatcctgtttgggatttacctcgtgcaatcattgtccttatggtttcaaaactattggatgatcaatatctcgcaaagcaccgtgtttaaaatgcggagcgagctgtttacccatctgcatgagctgccgattccgttttttgataaacagcggctcggggacttaatgagccgggtcaccaatgatatcgaaaatgtcagctccactttaaatacatccgtcattcaagtgctgtcgagcgtcattacattcgtcggcacaatctccgtcatgctgtacatgagtccgcttttaacattgatcacgcttttgattattccgatcatgcttttgagcattaaatggatcaccaaccggacgggattgctgtttaagcagcagcagaaaaacctcggcgagctgaacggttttattgaagagtcgatatcaggggcgaaggtcattaaagcctattcgagggaagaccgcgtcatggaacaatttttagaaaaaaacgcggcgttacaatcatcggggttttgggcgcagacaatttcgggattcattccgaaagtcatgaactctttaaacaatttaagctttacgattatagcggcggtcggcgggctgtttgcgctgaaggggtggatttcaatcggttccatcgtcgtattcgccgaatattcgcggcagttcacgcgccctttaaatgatttagccaatcagttcaatacgatgttatcggccatcgccggggctgaacgggtgtttgacgtgctggatgaaaaagaggagcgggaagatgaagagcatgcgctgtaccagccgatcaaaacgggagagattggattccgagatgtctccttcggctatcaggaagacagcccgatcttaaaacacctgtccttcagcgttccgaaaggacagtcaatcgccttcgtcggaccgaccggagcgggtaaaacaaccattacgagcctgatcgcccgtttttacgagccgaataacggaaaaatcctcattgacggaacggacatcaaaaaactgacgagaaccagtctgagaaaaaacatggggtttgtcctgcaggattcatttctcttccagggcaccatcagggagaatatccgctacggccggctggatgcttctgacaaagaggtggaggcagccgcaaaagccgccaatgcccacggattcatcgaacggctcccgaaaggctacgataccgtccttacccaaaacggcgcgggcatcagccaaggacaaaaacagctcatttccatcgcgagagctgtgctggcggacccggtgctgctcattttggatgaagcgacgagcaacattgatacagtgaccgaagtgaaaatacaagaagcgctcggccgtttaatggcgggcagaacaagcgtcatcatcgctcacaggctgaacacgattcaaaaagcggatcagattcttgtgctgaaagacggcgaaatggctgaaaaaggaacccatgccgaacttctaagccagaacgggttttaccgggaattatatgaaagccagttccgggaatcatagatagggaaaaagacctccgacagagtgcggaggtctttttttagcgaaggcaaatagtacttttaagttattttcgttaaatgtaacaaaattacttgacgtaaataagttatgtatatatactagcttacataaagtaagtgataataattttcaaggaggattttatgaataaatcattcgaaacaggaacactgcttttaagggttgtaacaggtattatcttttttgttcacggtttatccaagtttcaagggttggaaggaactgcgcaatttttccagagcatcgggcttccggcctttatggtctatgtcatcgcgacgattgagcttgtcggcggggttctgatctttttcggtttggcaacgcgcattatcggcgttctgtttgccgtcacattagtcggcgccatcttcacggcgaagctttcctcaccatttatgggcggatcggaatttgatttcatcttactggttgcgtcaattcatttagcgctttcaggaagccgtctgctttcattggatcagctccttttcaaatcaaaaaagggagaaactttttcagcataagaaagaaggcgttcaaatgaccggcattcatcaagatacggcaatcggttatgtcaaattgaccattaaaaatatggaacgctcgctcggcttttaccggaatgtcatcggccttcaagtcatctcgcagacagatcgttctgcaagactgtcagcagacggaaaacgcgtcctgctggtgcttgaagaaaatccaagcgccgtcgttctgccggagcggtctgtcaccggcctttaccatttcgcgatacttctgcctgaccggaaagaactcggcatcgcattggccaggctgattgaaaacggcatcgcgctcggtcagggggatcacgcggtcagtgaggctctttacctgtctgatccggacggcaacggtattgaaatatacgccgatcgtccccgcagcacgtggcgccgggatgcagagggcaattatgtcatgcaaacggcgcccgtcgatgtggacgggcttttggaagaagccggagctgaacggaaaagccgtctcccagaaggaactgttatcggccacatccatcttcatgtgacggacttacaggaagccaaagcgttttacaccgatattctcggttttgatattgtcggcaattacgcgggcatgtccgctctgtttgtttcagcgggagggtatcaccatcacatcggtctgaatatatgggccggaaaacatgcgccgccgaaaccgggaaatgcaagcgggctggattattacaccatcgcgctgccgcatcaaaaagagctgtcacgtgtgacaaaagcgctgaccgatgccggctttgagatcgaagaaaaagaagagggcgtattcgtcaaagaccctgtatcaggggcggatatcgcatttacactgtaagaaacaaaccttgccgtctaaccggcaaggttttttatttttctgaagttttcttgaaaaggctcgggaaagaagaacgtcgatttgcaatatacacacggcttttgagtgactgaagagagcgaacatctcagtgatgcgcaaaaatgacgcgtggagccgccatcgccggcccgagctcagggcatccgccggattgaaaaagctgtatgggcagaatttgaatagaaaaaggcaaaagccgcatccggtcacaagatgcggcttttcatatacaatttacaattgtgtgaaaaatgtccaaaataaattgtgcttcctgattcttcctgatatgataagccgaaaaaggagaacctgaacaaatgaactcaaatgcagcacagacggaacagccgatgaagcataacggaaaccggatgacggtcaaggactttatcattcttgccaaaccggggattatcatctcaaattcactcgccgcattgggcggattttggatcgcatggattcagtcagaaaggacgggcggagggcccggtatatttgccgccatggcggttgccatgatcggaacggcgttggtcatggcatcaagcactgtttttaataacttctttgaccgcggcatggacgcaaagatggcgcgaacccgcacccgcgccagcgtcacggggagaataccgccgccggtcatgatcctgtacggcacatgtctcggcgcatgcggattcatcatgcttgtttcgcttaatgtactgaccgccgttcttggcctgcttgcctttttgctgtatgccgtcgtttatacgctttggtttaaaagacaatccgtctggagcacatttgtcggcagctttcccggggcggctccgcctttaatcggttattgcgcgctcaccgggtacattgatatgcccgcgattttgttatacgcgattatgtttttgtggcagccgccgcatttctgggcgatcggaatcaggcgaaaggaagagtatcgtgccgccggcattccgcttttgccgatcataaaaggcaaccgcgccacaaaaataaaaatgctgcgctatattgccgttctgactgcggtttcgctgctcgttcctctttatatagacgtcagcccgttttataccgcgtccgctctcctgctcggagccatctggctgtaccggagcgtcaaaggctttcaggcggcggatgacacgcaatggtcgaaggggatgtttttttattcgattgtgtatttcagtctgctttttcttattttaatggctgattcatttatcaatgcggttctcagaacgtaaacaggcggcttgcagatacagagccgccccgttttgtttatgcttttttgatgagagccaaaatatcttcaagccaggaaatataattccgttcccgctcaagcgcttttgtcagtacgagataatggccgaaatcaggagaagaaaatgaatccgcctccgcggacgatgtcatcagttcttgataactgttttccagatcggacaatttctccttccgctttacgagctgatcggtgaatagctcatccgcttcttcctgcgtcaaagctgagatgaaataagccttcagcataaattcatccttcaccgtttccggaatcgggtcttttttcgtcagccaggcagcaagctccagctctcccttgtcagtcagcgtgtacatttttttctcaagctttgttccttgaatcgcagtgcgaaacgtaataaatccctcagccgtcagtttttttaattccggataaatctggctgtgcttggcgctccaaaactggccgagctcttccttaaaatagctcgatatatcatatccgctcaattcgccttttcgcaaaagccctaaaatcgcgtactttaaaattctcatgttgtcctccaagccattcatttgacagctagtataccatacggccgctcaaaaacgcagaagtgccggatgcttgtcattgaatccgcggcggcaaaatcagcaaaaatatgcagaaaggggttatcgaaacggcagcagaacggaaaaagcctttctcgtgtctttgcctcattcatatgacatcatgatataatcattgtaaaaattaagaaataatgggagggacatatgaagacggtgattgtgtatgcaaacccggatgagaacagtttcaatgcggctctcgtaaaatacgtcgtcatggctttaaaggacagcggccaaagctatacggtcattgacttatacgccgaccaatttgatcccgtgctgaagtacggcggcgaaaaaaagcgctctgacatgaaccgggacgctgaaacgaagaaataccggaaactgatgaaagaagcggatcatctcattttcatctacccgctgtggtggggaggcgttccggcgattatgaaaggcttttttgacagagtgcttgtcgccggagaagcctacacatatgaaaacggccgcgtaaaaggactgctccgggcagagacggcacaggtcttttatacggcggattccccgggctggtacttaaagtggttccggaaaaactcggactggattacactgaaaaaaggcattctgcaattttgcggcattcaaaaagccgagcggaaccttttttctgtcgtcaaaacgagcacacccgagctgcgggaaaaatggctgcgccaagcatacgctaaagtccggcgcgcttgtgaaaaaggagcggccgcatgcagataaaagaaatttttgtgattcgctgcctgtcctgtttaagtgtggttctgcttcacgtagtttcaatggtgctgatgattcaggaagagtccttagccagtgccgcccatacggttgatgcttttcggaccctgttgatgttcagcacgccggcgtttatctttatttcggaatttctgcttgccaggtcataaccgggaggcgttcccgcgggttttttaaagaaaaggggcaaagtcattttcgtgccgtttctgtttattgccgcggtggatgccattttaatgaaaagcgtggcggaagaaggagccggcttcgtttcagtgatcggtaaatttttagagaatgtgtttttaggaaacttcatcggctacttcattcttgtgatctttcaattttacattctccatatgctgctgcaccgctggctgaacaacacatctcccatgtgggtgctgtctgtttcgtttatcatcaacgccgtctatctggcttacttttccatctttcatccgccggcatcatcggggcttgattctatttttccgttcttttgggttccgttcccgggctgggtgttttatttctgtctggcattttattgcggaaaggaatatccgcgttttttatcgctcatcaatcagtaccgttatgcggtttacttcagtgcggccgtatcggcaatattgattgtggccgtttcatatatcagcggcggctccatttcctctaagcgtccggatattatgatttacgcggtcagtatgatctttctgtgttttcatctgttttcaaagctcaaaaaagtgcccgcgattgtgatgatgatcagcaactattcgttttcaatctatctgctgcactcctactttttaatcagcggatatcttctggaaggctatttgcgatcaatgcctttagcggctgccatccttcttttatttttgatctgcacgctcggtcccattttcgtatcttgggtgtgcaaccatttcagatacggatacctgtttgtcgggaaagtgtatcagccgaagcggaccaaaagaaatacggcggcgcatcaaggccgcacagtctgaaaaaaaggcggcgtttcggccgccttttttgatacggaagttgtacataacctgcaaacgaaaccctccgcggcaagccggaagcgaatgccaggcaagcagtatcgggcagcctatctctaattttaatagcgctttcactgtaaggctgaagaccccgctgcggccgttttgacggatgcatttatgacaacataacgccatcgattttctcccttgtgaagaccgatatattgtatacttataggaaatactttcaaaaaaagtgaaaaagagaaaaactgtgagcttgaatgaacgactaaaaaggagcggggacattatgaatgactgtgtcaaaacattcggagaacttccggacgaactttattcctttgcgggaggaaaaggaagcattctctctaaaatgtatcaaagcgggtatcctgtgcctgaagggtttgtgattttgccgtctgcctttcaggacggacagctgcgccatcaggcgagagaggctattgatcaatatgtgaaatccatccgcagccgccatgcatctgcgttgtttgccgtacgatcatccgcgctgagcgaggattccgctcaggcttcctttgccggagaattcgatacggtgttgaatgtcaaaacagatcaagacatgtccagggcgattgatgaagtccgccggtcggtacagtcagaaagagtaaaggtgtacagcgccgttcagggaatggaagatgagcatgaaatcgcaatcgtcatccagctgatgataccgtctgagatatccggagtgctgtttaccgcagatccgattacggggagcaggcgggagatgacaggcaattacgtctacggtctcggggagcagctcgtttccggggaagccgatgcctattcttttaaactggcacggcctaagaaaaaatatgacggtcccggggaatttcgcaaatatgcgtcaaagctctataaactggcgaaaaagctggaaaaagatcttggagggccgcaggatattgaatgggccgccgcgggcgggacattgtatattctacaatcccgcccgattacgaccttacaggccggaaatctggaaacctatgaatggaatgattctttcagcggggattttttatggacaaacacaaatataggagaagcgattcccgatgtgatgacgccgctgacatggtcgctcctccggaatctggatgaagagtcgggcatcattccgggctattatgtctggtccggcaatatttgcggaagagcctataacaatatgagccagcctctttccgttctcgccgctttcggtctgaatccgaaaggcggaaaaataggaaaaatgatgagcgatacattgggagaaatcccggcggaaatgaagattcctttatatccgttctcaaagtatgaacttttgaagatcatctcgaaaaaactgaaaccgtatctgtcgaaaatgaagctcgcgaaaaaaaacatgtcctcctacttggacgaatcgccggagtggtgccggaatattgaggaaaagctgaaacgggccgaaacggagcgggcattattagcgatatggaatgatgagatctatccgtatttatgcaacgcgtggtttgcgctaatatccggcgggcgtgattctgcgcaatcctcttcgtcgttaacctctcaattaacaaaactcgcagggatagaagatgcgaatctcctgctctccaatctgaggggaaaaggcggactggcaagcctggagccgattatcggcattgatcaagtcatgaaaggccgtatgagcgaggaagaatatctcaggaaccaaggccaccggggcccgcatgaatacgaactttccataccgcatccgggagaaaaccgggattggctgacgaagcagatcaaagaacacaaggagtcgggtattgatgccgaacaactgcttttgaaacagcagcgggcgcatgaacaggccttccgaagatttgaagaaaagtttcctcataaggtcaaatggctcaaagccaaaatggaaaaagcgtcagaatacgcgaatatgagagaaacaaccagatcagaatttgtcagggtgtaccggacagccagagcattcgcgctcagagcggcggaaatgaccggcatgaaggacgatattttcttcctgtatctgcatgaaataaccgatctgctcgcggggaaagagccggcggttgcgtcgattcaagcgagaaagcaaaactatgaaacctataaaaaactgccgccgttcccatccgttattaacggaagattcaatccgtttaaatgggctgaaaatcctgacagaagagcggattattacgatgcttttatgcctgcggaagctgatgatgcgcacactttaaaaggtttcgcgggagcggccgggagagtggagggcattgtccgtgttcttgatgtcccggaagacggagattcttttgcggcgggggaaattttagtgacgtcgacaaccaatgtaggctggaccccgctttttccaagagcggccgctatcataacagacgtcggcgcccctttgtcccacgcggcaatcgttgcccgggaactggggattcctgccgttgtcgggtgcggaaatgcaacgtcaaaactgaaaacgggggacagggtggccgttgacggcgggcaaggcattgtccagctggaaccgcggcagactccggtcacttctgaagaggaaaatggtaaactgatagaataaaaacatgggaaaggagccgcgcatgaataaagcagttattaacggggagcaaatcagaagtatgagcgacctgcaccagacattgaaaaaggaacttgcccttcctgaatactacggtgaaaaccttgacgctttatgggattgtctgaccggctgggtggaataccccctcgttttagaatggagacagtttgagcaaagtaagcagcttacaaaaaatggagccgagagtgtgcttcaggtctttcgtgaagcgaaagcggaaggctgcgacatcaccatcatactttcataatacgatcaacgggagagagacaaaaatggaacaacaaatcatcagctatccgattggagagtatcagccggctgaatcgatttcggccggacagaaacaagaatggatcaatgcgctcgaacacgctccggccaaactgaaacaagctgtcagagcgatgtcggacagtcagcttgatacgccgtaccgcgaagggggatggactgtccgccaagtggttcaccatctggcggacagccacatgaacggctatacccggtttaaattgagcttaacggagaatgaaccggaaatccgtccttatgatgaaaaaggctgggccgatcttcatgattccaaaaccgccgcttgcggggatgcgcttgagctgttagcgatcctgcacagaagatgggccgctcttttgcgctccatgacggaagcccaattcaaacggacatacttccatcctgtatctaaagagacggttacgctggaacaagcgctcgaactatatgtctggcactctgaacatcacatcgctcatattactgagctttcccggaggatgggctggcatctgtcttagaggatgccggctttcggaaaaacgccaaaacagccgcagatacaatcgtgcataatgaaatgacggcggctgccgtataaagatggtggtagccgctggcaatgcccgcttcaatcgcatcagaaaccgcttttttgacagcgggaacggggattcggcttacctgctcctgcaacgaagaaagtccgccgccgatatccggcgtttgcgcctgatcagcgggaatgccgcttttcgctaaacggtttttgatgtcatctccgatccggtcaaagcccgctgtaatgaagccggcatataaagccggagcgagcgtcagcccgacctgccttacgagtgacagcgtgccgagcgctgttcctttgttttggcccgccgtttctgatacaagcacattcagcggagccccgagcagaaatccgaaaccgatccccgcaatgacactcgctgtgacaaattcccatttatccgtcacccataacggaaacaggctgaagcctgcaaatgcgatggcgcctgatacaaccgcggaaaagaccggaccttttttatccgtgatcgccccgccgagccacgctccgattcctgacgccaaagcgagcggcgtcatccaataacctgctttctccgccgatacgtgcaaatattgctccgcataagaaggaataaaaatgaccgcagcgagcagccctcccgataaaaatccgataacgagcgtccattgaaacactttattttgcagcagcgagtaggcgagaatcggatcgccccctcggttttcaacccgcttttcgaccttaagcagcaccagaaagagaagtgccgatcccaaaagataaccgtacacctttacgttcattatgctttctgacagcttcgccccatcgagattcgtgataccgatcatgcaagataagatcgcaagagacagcagcattgtgccggcgaggtcaagccgtttcgcctcaggctctttcgtttcagcgataaacaaaccgccgcacacaaccaaagcggcggcaatcggcagattaatcaagaacagccaatgccacgacccggttacatcaagcaaaaagctcccgatattcggtccgaggacggccgccataccgttcatcgcccctaaaagcccgagagctttcccttgtttctccttcggaagcacggccagcacatgcgaactcccgataataaaaattccgccgccgccaagcgcctgaatgagccgtgccgccaaaaacatcgggaagctctgactgagtgcgacaagcaaagagccgagtccgaacagcccgacttccatcataaacagctttttccgcccgtatcggtccgacagcttgccgacaatcggcacactgacactgagtcccaatgtgtaaagggtcactccccacgatccccatgaaggagaaacatcaaaagagctgttcatcgtcgtcagagcagcggaaataattccgttgtccagcgccgccatgaacacaccgatcgtaaagagagtgatggcccggctctggtttttttctgtttgcaatggctccggcatactgatcaatcctcctgtttttaattcacttcgaatatattattcacttcaagtgaattaaatgtcaaacaaaaaaaggccgccgataccggcaggcctttttcacctctatccctgtttggaagaatcaagcgctcttgccaaaatggcaagcccttgattgaccgtttgtttttcttcagcggtcagcgtttccaatgaacgcttcaattttacatgtcctttttgataaaggctgcggaaaatatctttcgcgttttccgttaattgaacgacgactgaacggcggtcttcttctgacggagcgcgtgtaatgaaacatgatttttctaaacggtcaagcagccccgtcgtatttgaaagggaagcgcccattttctccgctatgtcactcaccttaagcgtcccgtggttgttcagaagcatcagcactttcatttgcggcatgctcatatcaagcttcatccactccgatacatcgccgagccccgccgatgtcatcactttcatgtacagcacccaaatatcccgttcctcaggagaaaaaatatcgccgcttaatactgttgtatcatgcagattataatccatcgtctcacttcctcatttatactcctgcatatcatattactgattttaatcagagaaagaaagttgcagacgagttttgtttgaatgtgaggtggtagtgtataatatgttggagattattgggggaattaaaataaataagctattttatgatgattggagagaacattgctgactaaaaagaatgccttatcgatattaaaagtattatttcctattgcagttttgcttttagtcatttatcagtccaaaaaggaattgacagacctttcttttaaacgaacgctgtacattattaacgggattgagcgttacgatttatttattctcgttctgctcggccttcttgccgtcagcgcgatgtccttttatgactttgtgctgaaacggacgcttcgcctcaacattccgaattggaaagtattcagggtctcttttatcgccaattcctttaacaatgtccttggattcggcggtctggcgggtgtcgggctgcggacgatgctatacaaagaacatacgaatgacgtaaaacgcctcgtcgcaggcatcgcctggcttacgtcctcagcgctgctcgggctgtccgtcttcagtatcctgaccatcgcccgcgttctgccggttggagagattacaggtgagaaaccgtggctgtgggctgttatcgccggagtggcgcttattgtgccggcagccttaatcgccgctgggatcaacaataaaaaagctggcgcagaagacggtgaagcaaaaccgaggcatccggttttttcttatatcggggcatcgtttgccgaatggtttgcggcggctgtcgtcatgtattattccctgtatgtcatgggaattcacgcggatgtccgccatgtattcggggtatttgccattgccgctatcgggggaatcatcagtcttgtgccgggaggattcggttcgtttgaccttctgtttctgctcggcatgcagaatatgggctttccgcaggaggcggttgtgacatccatcgtcatctaccggattgtgtattcatttattccgtttgtgttcgggctgttctttgcggctggcgatttaacggaaaatacgcttaaacggctggaatcaaatccgaagatggcgcctgctgtggaaacgacgaacgtgcttctcgtattccagcgcgctatcttaatcagggtgctttacggttcgctgtcgcttttggttttcatggcgggagtcgtcgtgctggcgtccgtcgccctgccgattgacagggagacggtcatcccgcatattccgcgcccggcgctccttgcgtttaacgcgttatcgttaagcgcggctttgattcttttaatcttgccgattgaattatacaaacggacgaaacgttcttattcaatggcggttgccgcgctggtcggcggttttgtgttcagtttcttaaaaggattgaacatcagcgcgatctttattctgcctgtcgtcatcgtattgcttgtgctgttaaagcggcagtttatcagagagcaggcttcgtatacgctcggccagatgatttttgcggccgctctgtttattatcgctttgtttaactacaatctcattgccggctttatctgggataaaatgaatcggctcttgcgccacgattatttcgttcataacaattcgcacattacatatgccacgatgacggccattattgttgtgccgctgtttttccttttgtttacgttcttttatcataaaagatcgaagccgatcggagaagaggccgatcctaaacggctgaagtcctttttggcggaagaaggcggaaatgcgctcagccatctcggttttctcggggataagcggttttatttctcaagcgacggcaaagcgcttttattgttcagccagatttccagaaggcttgtcgtgctcggggatccgtcaggacagagagactcttttccgcttgtgattgaggaatttctgaatgaagcgcataagcaggggctgagtgtcatgttttatcagatcgaacgtgaagatctggcgctgtaccatgacttcggctataacttcttcaagcttggagaagaagcgttcgtggatatggaggcctttacgctctcaggtaagaaaaaagcggggctgcgggcgattaacaacaaatttgaccgcgaaggctacacatttcatgtcggggaaccgccgttttcctccgagtttatcgccaagctgaaagacatttcggacgaatggctcggaccgaaaaaagagaaaggtttttctctcggtttcttcgaccgggattatttggaacaggcgccgattgcttacgtgaaagacggggaaggggagatcatcgcttttgccaacctgatgccgatgtatcaggaaggcgagatatccgtcgacttgatgcgttatcggaaaagcgcgccgaacggtattatggacgcgcttttcatccgtctgtttctctgggcgcaggaaaaaggctataccaccttcaatatgggcatggcgcctttgtcaaacgtaggaacggcttttacatctttctggtcggaaagaatcgcggccgtcatcttcaacaacgtccggtatatgtacagcttcagcgggctgcgggcctttaaagaaaaatacaaaccggagtggcgcgggaaatacttggcgtaccgcaaaaacagatcgctgtccgtcacgatgatcctcgtcacccgcctgatcggaaaaaccaaaaaaagacgccgttaaaaggcgtcttttttttgaataattaactaaaaattctaattttactctgttatactgaataacatgatcataaggtgaaaggaaggctgatgaatgaaacaggcaaccgtgtttaaatatgaagcgttttccgatattccggatttgggaaatcccgcgggaatcgtctttaacggagatgattattcagatgaagagatgcagatgatcgccgaaatggcagggtacaatgaaacctcatttctctgtaaaagcggggaagccgatctgcgcatccgctattttacacccggccacgaaatgaatttatgcggacatgctaccgtcgcctctctttacgcattaattgaaaagggaaggcttcaggctgatcagacatatcaaattgaaacaaaagccggcattcttcccgtaaaagccgctgaacgaagcggccgggtatacatcacactcgatcaggctcctccgcaatttctgccgtttacgggcgacaaagaaaagcttgcggcctcgctcgggattacggctgaggattttcacagcgggctgccgattgtctacggatcaacggggatctggacactgattgttccgctgagatcacttaaagcatcacggaatatggtgccggacaacgcacaatttcccgctattttgcgcgatcttccgaaagcgagcgttcatccgttttctctggaaaccgttcatccggaaagtgatctgcacggacgccatttttcttcccctttctccggaacgaccgaagatcccgtcacgggaaccgcttcaggcgtcatggcagcctatatgcggcaatacggaggctccgaagccgaatgcctcacgattgaacaaggccaggaaatcgggaaagacggaaaagtggaaatcaggatcgcggaggaaaacggagagatgaacatcaagatgacgggaacggccgtgtatgccgaaacaatcaattttcagcttccgtaacggtttacaaatgccggtcgtatccgttatattataaatgataatcattttcatttggataggaaggtgaatcggcatgccgaaaaccgaacaattacagcaaaacgaaagtcttgcacatacaatcagaaacagaagatccatccggtcgtttaaaccggaaaccgtaccttctgaagtcatattagatatgcttgaaaccgccgtttacgcaccgaaccacaggctgacggagccatggcgttttatctacgcagcaagcgaagcgggaaaagcaaagcttgcggacagctacgtctcatttttcaaaaagataaaagatgatttcaacgaggaaaaagagcggaacatgagaaaaaatctcagcgccgttccgggatttttgctggtcgtcttaaaagaagatgaaaatgaatttacgagaaacgatgattttgcggcgctgagcggcatgatccaaaaccttcagcttctcgcacatgaaaacggcatcggcatggtctggaaaagcggccgcattatgtatgacaaacaggtgcaccaagacttcggccttgctgacaatgagcgctttgccgccatcattcaaacgggctatccggatgaacagcctaaggcgaaagaacggacgccggcaaaaagcctgtttaccgagttgtaaaaaaatccccgtctcactacagaggcggggatttcgtattagcgggttttgcttttagctctgttgtcagcggctttcatccgcgcctgcgcttcacggtcagcggaatcagcaagctcgcttgaatattcctcatatgtgccgtctgtttcgcgtttcaaagcatccggaacttgaggaagtttttgtttgtttttatcacggtttttgtgagtatgatttctgcccatatcaatcgccccctgaaaaaagtgatatcaaacaaacatagtatctgcccaatcccgatctttattcagtttatttccgtttggctactctttccgcttttttgaattcaccggaataaaggacttcctgcatttttttcagattggctccctgctgatgtttttcgcgcttcttttccataaaagaagaccctccttcaaaacagaataccaataggattggcttttatttccgtttttatgcagataagagatcctttaaagccaaatcaagttcttcatacgtaaattgaaaaccggatgtcagcgcctgcttaggcagggcgcgctggccttttacgatcagcaggctcatttctcccaaggccttctccagaaaaagttccggtacgggaatccaatgggggcggtgcaggacgcctgcgatcgtttttccgaattgcttcatttccacggggttcggcgatgtcacattcatgggaccggacaagtcatcatgctccgccgcaaaagcaataagttccgcggcgtcatcgacatgaacccatgacagccactgccgtccagagccgatggtgccgccggctaacagcttataagggagaaccatgagcggcagggcgcctttttcaccgagcatcaccccgaatctggcatataccgtccggatgccgagcgcttcaattttctggccttcacgttcccatatatgagccgtatgactgagaaagtcttcatttgacgtatcggactgttcggtgaacgttttctctgtacttgtgccgtaaatgccgacggcgcttgcctgaattaaagcccggggttttttcggctgctgcttcataatccgtctgacttctctcgtcgcttctacccggcttgagatgatttgttccttcgttgtgtccgtccagcggtcaaagatggatttgccggcgaggttcacccatacatcaatagggggaagctcgcgctcaggcgccgcgttttcggccagccattgaacatatgtcacatttttttgttcggtttctctctgttttcttgataaaatatagacatgatgtccccggcgggtaaacacacctgtcagatgccggcccagaaaaccagtgccgcctgtcatcgcgatattcatatccatctctccttacacgttgatacatatactgtacctcatttgccaaaaagaaaaacgcctgaacatcggggcgggaaaggagaccgggatgccgtttattacaaaaatatcgacccaaaagaaaaataccgagcgcttcaacatctttcttgatgagaaatatgcattcagcgtcgacgccgacgtgcttgtgcgttttgacctgaaaaaagggaaagaactggacgagcttgacattcttgaaatccagtacggcgatgacgtgaaaaaagcctttaaccgcgccgtagaatttttatcataccggatgcgctctgaaaaagaagtccgggatcatctgaagaaaaaagaaacaccggacatcgtcatttctgaagtcatccataaactgtacgattaccgctacttaaatgacaaagaatttgccgaagcctatgcgagcacccacaaaaaaacaaacggcaaaggccctgacgtcctgttccgcgagctgaaagcgaaaggaatagacgacgataccatcaaggagacgctcagtgcgtttacatttgatgagcagatacaagaagcgctgaaacatatcggcaaaatcctcaaaaaagacaaaaagctgtccacaaaagagatcagacagcgggcgcagatgcagcttcagcgaaaaggtttccctttcgacgtcatcaatgccgctctggagcagacggagtatgaaaatgatgatgaagccgagatggaagctctgaaggctcatgcggaaaaagcgatcaggaaataccgctatgacggcagctatgaaagcggaatgaaggttaaacagtacttattcagaaaaggattctcgattgacgatattgatcaatttttgcaggaagaggagtaaactgaaatggacaaacgatacagtcaaatgacgcctcatgaactacagacagaaattgcgggactgacggaaaaagcgcgaaaagcggaacagatgggcattgtaaatgaactggccgtgcttgaacggaaaattacgatggccaaagcttacatgctgaacccggaagactttcggcccggcggggtgtatcagatagaaggttctgatgacactttccgcattgattacatcaacggcgtattcgcctggggacacagatcttccccgtctgacggggaagaagcactgccgatttccgttttaaaagaaaaaaaataacaaaagaggccggttccggcctctttttcttttcgggcacattcgtttcatactttcagtaaaaaatgattgaattcatttttgatatcttttaagatggaattcgttgttttttaaataaaaaggaggcgatttgcgttgaatatcaaaatgaaacagccatctgtgaaattaatgatttttgttttaatgatttgcacattttccatcgggtatacggaatatgctgtcatgggtattctgacgtcgattgccgatgactttcatatacatgtatcttcagcgggcatgcttgttacggcgtacgcggcaagcgtctgcctgacgggcccgatcgtaaccattatcgcggttaagctgccgagaaagccggtgctgctaggattgatgggcatcttcgtccttgccaacctgatgagcgtctttgcgccaaacttcgccgtgctggcgatttccagaattttatccgcatccatccacggagctttttttgcgatcgccatggtgtttgcgagtgaaatggtgccgcctgaaaaacgttccgccgccgccgcttccatgaacggcggattaaccgtggcgctgatgctcggtgtcccgttcggctcttatttaggggatgcccttaactggcgggccgtctttttcattatttccgttttaggcatgatcgggctgatcggactgatgctggtcgtaccgaaccgaaaaccgaaagtgattccgatgctgatgaatgaatggagtgtctttaagcataaacaagtgattttttcctttgcgatcaccattctcggctactcaggcgtatttatcgcttacacgtttattgagccgattttaagagattcagcggggttcggcacagtcggcatcacaggcgcattatttgcctacggtctcggcggagtggcggggaatttcttcgcggggaaagtgccgctcaaactgctgacacgcacgatgatcggtgtgatgatcggcttgatcggcgtcttggcgattttcccttatatcgctgtttttcccgccgccgcggtttcagcgacatttttattcggcgcatgtgcgttcggcacgccgccgcttttgcagaccaaggttatttcttcctcagaaaacggcacgacaatcgccgctgcggtgagcgtttccgcctttaacctggcaaacgcgctcggcgcctggatcggcggattgattctcgggggaacgggatcttactcatggctgtttgccggcggtgcgctgatgacggctctcggccttgtgctttccacgttcgctcatctgtctgagaagaaagatgtctatgaataccaagtgcataaaggataacaaaaagcttgcaggggatattccgcctgcaagcttttttcagtgtttcaatgtaatgctgatcaccgtatgtttatcactctcagctaaggaaatattccgggtttccggtactccgtctttttcaaaaacgacggcataggttcctttcgcgccgcttttccatgcaatctcgccgtggtgattagtcttgcctattatctctccgcggtctatattcggctgatgatctgactccgccgctttcatcacggtgaccgtcacaccggccgccggtgagccttctgcatcctcaacatggagcgtaacgggcaatgcttttttggcggcggaatcatccgctttgccgcatccgcataaaacggccgcggcgagaaagaaaacaaaagctttattgatttgaccaatattgaatgttgtcgaatacactgtttgtcacccttgttcccagattgtaagacgacccgccgtttgtatgaatggcaatggcggtctggccggtgtcgctgtaattgcggtaaacgggcgatccgctctggcagccgaacgtatctgtcgtataagtgagtttatatgtctcggcagaacgtatcggcttgctgtccgaccacatggaaccggacactttgtcgcacggatatcctgtcacggttgaggaaagcccggccggactggaactgttggtcgtccggtagccgtaccagccgacagtattcccgggcgacccgtttactttgattgccccgtagtcatagtttgtgtcaccgttttctgtccaccctttgacactgtagaatgtcttgcctgaataagagccgtacgggtacgatgatccgttgcggccgggagctgccgtaattttcgatgcccagccgtttttctggtcatacacgcaatgccccgccgtaacgatcgtgtcggcattgacaaaaaaaccggtgcatccgtaggtgcttgtgctgccgctgtatgtaacggtcagctgtgctgtcgctcgatatggaaatgatgttgtaggagaaattctgattcgttcgtctgtcccaataatactggaaggctttaatgacttgatgtcagctttgctgttttgtgcaagctgtcttttggtgaggcccgttccttcataagcgggggatgtctgtgttgtttgtacaggctgattctgatgtgcgtcaaactcctcaccgctgtttgatacagatgtctgcgggctgcccgctgcttcagctgaaacagcaaataatgaaactgacagtaagaatgcggtaaggctcagcaatcgttttgaaactgtcttcattttataaaacccctccttttttgtctaccggctttcggttgaacatttaacatattatggaatttatttagcgttatgaccgcaaaagaatgtttttctccgcaaaaaaaagaccgggtcattcccggtctcttacggtgtgtgttatcgtctgcctgaagctctcatgcgttcttgcgggtgcgaattaattgaaccgtccgcccgtttagaagcgtagtcatcctttgcccgcggttcgccttcaaacttattattgttctgattaggaaatccttttgccttgttccggaccatttgttttccccctcggccaatatcaaaaggttgcgccttctggactgaagacgtaaagttagtatatgcctgtgacaagctgcgtaaaagcagcaggttttcccaaggaaaggagacagagacatgaatacatatatcgacaaactgacgaatttgctgcttgagaaaaatgacatgctcagctatttgcaagcgcgaacttgggttgagcttttatggggagatttcgaagcgacttacgcaaaagccggccgcccgtatcaaggagagcaaatgacggaacgcgtcgtcaaggaatggatcgaatcatacggcagcaagctccatatgttccagagcgttcgggaagacgtttctcattatttggatcaaagcaggggtctcctgcattaacatagcagtgcgcccgccggatatcgtccggcggttttttttataaaagaaataggaaaatcatgtttggcgaccggcggaatgtggaaatgtgtaataacttataaaatagcggggaggaaccacaatgaacatgaaaaaggggttaaccgcatttattccggccgcaggactttgcttatttttagccgcaggcaccgtttttttcgatccggcagcgaatgccgcagcagttcaccagacaaaaatagacaccgcagcagatacatatatcgtgaaagcaggagaacttaacgtccgcaaagaaccaaataaacagggggcgattatcggcacgcttcgttcagaggattccgtaaaggttaaacggcttcaaggaacagattgggctgagattgactacaaagggcacaaagcctatatttccacgcattttctgatgaagcagccggtgaaggcggtgaccgcgaaacaaaccgccttttatacgccgactttggaaaccggcaaaaaagggtccgttaaagcgggtgaaaccgtcaatgtgctcggctgggggttcagccatgacggaggatttgaccgtaaatgggcgtacgtcacatacggcgggaaagcaggttatgtgaaaacggccgacttaactcaaaaataaagattcaggcaggcgaatgagcctgctttttttctgaaaccttccgcctttcctttcgtaaaagatgaaaaggagagtgagggatatgataatggtaatcggcggccttctgatggctgcggccggcattttagtcacattttttccgccgaagtcgatcaacagcctgtacggatatcggacgaagcgctctatggcggatgagtcgcagtggaaagaaggcaatcgattcagtgcgctcctcatgattttgttcggccttatatcggcggcagctggatttgcgggcagcctgcttatccggctgactcagccgttcgccctgatcgttcaggccgtattgttgattgtgatcagcgtactgatcatcgtcttaacagaaagaagattgaatcaaacggggaggagaatcgatgaatgacattacgtttcacatgatcgaaacaaacggagtgacgctgcacacggcttcagccggtccgaaagacggtcctttggcggtgctgctgcacgggtttccggaattctggtacggctggaagagtcagatcaaaccgctggcggatgccggataccatgttgtcgtgcctgatcagcgcggctataatctcagtgacaaaccggagggcattgaaaactataccattgatacgctcagagacgacattatcgggctgatcacgcattttacagatgacaaagccgtcgtcatcggccacgattggggaggagccgtggcctggcatttagcatccacgcggccgcaatacgttgaaaaattgatcacggtcaatatcccgcacccggcggttatgcggaaggtcacaccgttctacccgccgcagtggaagaaaagctcttatatcgctttctttcagctgccggaaaagccggaacggagattgtctgaagacaattaccgcgtattggatcacgcgatcggcttatccgaacgaccggcgcttttttcacgggaagatgtcgacagctacaaagaagcttggggcagaaaaggagcgctcacggcgatgctgaactggtaccgggcgatcagagccggcggtttaggccctgccgttccgcttaaaatgcccgttccgtaccgattaatatggggcgtcaatgaccaagcgctgagcaaaaagctcgccaaggaaacaaaacggatgattccaaacggcgacttaatcttcatagatgatgcctcacattgggtcattcacgaaaaaccgcgcatcgtcagccatttgattcatgaataccttcagcaataaagtctgtcccgcgtacagactttttcttttttttctcatatctgccgaaaaacatgacaaaatataaaccatatgcagaaaaaattttctttccctgtaacaaaaaaagggtttaaacgtcattaaaaaaaggaaaagccttactgaagttttgcggacaattcctttaaggccgtcctaaaaaaagaataatacaaagaaggtgccttcatgaaacaaaggttaatctcaattattattccgtcttacaatgaagggaacaacgtcaagctcattcatgaatctttaaaaaaagagtttcagacgattcattatgactatgaaattttctacatcaatgacggaagcgcggatgacacccttcagcagattaaagaactggccgccagaaaccatcgcgtcaaatacatatctttttcccgcaacttcgggaaagaagcggccattttggcaggatttgaacacgtgcagggcgaagcggtaatcgtgatggacgccgatctgcagcatccgacccatctgctgaaagacttcattcaaggctatgaagaagggtatgaccaagtcatcgcgcagcgcaaccgaaaaggggacagccccgtgcgttccgtgctttcttccctgtattataaatttatcaacaaagccgtcgaagtggacctgcgtgacggggtcggagatttccgcctgctgagccggcaggccgttgatgcccttttgaagctgagtgaaggaaaccgtttctcgaaagggctgttctgctggatcgggtttgaccagaaaatcgtattttatgaaaatgtcgaaaggaagaacggcacgtccaaatggtcattcagcaatctgttcaactacggaatggacggtgtcgtctccttcaacaacaagccccttagggtatgctttttcaccggtattctgatattgcttttgtcgatggtttatattgtaacgacctttgttcatattctgacacacggcgtgtccgtacccggatacttcaccattatttccgccgtgctgtttttagggggcatccagcttttgagtctcggcatcatcggagaatacatcggccggatttactatgaaacaaaaaaacgcccgcactatttaattaaagaagcgaatataacgtacggagaacaaaatgaaacgaattatacaaaaaagcgcaagtggaaccattaaacagccgccgctgtgcgcagggtctggggacgttgtatgaaaaaaaataaatggatcttgccggcagcctgtgtgctggctgcggcagccgctcatatttttttcttaaaagagtggtcgcaaggccgctatatgacggggtctggagacgggatcgcccaaatggcggtcttcaaaaagctgctgtttgatcaatatatgaacggcaggctgttttacagctattcgttcggactgggcgggggcgtgtacagtcagctcggctattatttctctacttcttttctattcctgtttatctccgccgctgtccgctttttgcagcttattcagctgacgggtgaggctgatgcgctgttttgggcgcaggcctccgtttttatcagcatcgccaagcagagtttgatcatattcacggcggcgtgtgtgttccgttatttcgtcaaacggacggtgcctgcttttaccggcgccgtgttgtacggggtctcgattatctacttccggcatgaggtatattgggactttttcactgacagtatggtgtggctgccgttgcttgtgttgggcgcggaaaaaatcatccgggaaaaaaagccggcgtggtttatcttcgcctgtgcgctgacattgatcaacaacttttattttgcgtatattaatctgattttcatcggcgtttatatcttattcaggtggatgatcccccttgaaggcaatgaggcgaaaaggctcactcaatgcaggatatttattctgtcgggtcttctcgggttcggcataagcgcagtttcctttattcctgtcgtatacgggtaccttcataatctgcggccgccgtattcagagcatattgcatggcttgatttttccgacaatattttattttctagccggattatcatcctgccggcggcttttttgctttttctatttacatttactttatacaaaaaccgcttgttccggctgtttgcgggaatcagtctgctgtatattctgtttcacttcagtccgttcgcggcaagtgcctttaacggtttttcagctccgcagaacaggtttgaatacgtcctgtgcttcacgattgccggaacggtttcagccgggctttctaagctttcagacatcagcatgaagagtatgctgatgtccgccgtactcgtcgttctgctctattggagccaggtgaggcggtacagtctggatatttctgattacgccaacctgcccgtcatccttcttctggtgctgagcatagccgctttctttgcagcaaagacaagactgaaaggcgcggtgcccgccgtctatgccgtcattttgcttacggctgtgcttacggctaatacatatgaaaaatatgctttatcagaaggcgggaagatttatacggtatcgcatacctttatgacgggtgctgactataaaggcaaagagcaatcagagctcattcagcgtctgaaagaaaaagaccctgatccgtttgcccgtttagattggatgaacggtgttttcaataacaccccgatcatatacgggttcaacggattcagcgtatactcaagcatactgaaccgcaatctgctgtccttttactggaacgacctccagattgacatgggcagagaaagcgtcagccgctatgcgacattaggaaacagggctaatttatacagcctgctttacggaaaatattatatgacggaaaaaacaaacgaggccggcgtgccgtacgggttcaaaaaaatcatggaatcaacccattatgcggtttatcaaaatcaatatatgcttccgttcgtacggacagccgatcgcgtatataacgagggcggcctgaaaaaagcgcccgcccttgccagggaacgggcaatgcttgacgggatcgtcatggaatcaagcacaaccaacacgaaaaaagcgcctgaggcgaaaaatatgatcggccatgcagaggtagcggccgaacatggcgattatcataacggcatcctgacggtaaacgaagacggcggcggcctgatcattacgccgcaagccgctaagatggacggcggcgattattacgtcagcttttatttgaagaataaagcgaaggaccagggctttacattaaaagtgaacgattacacgacaacgagaaaatcgaatcaatccatttacaaaacaggtgtcaacgatcttactgtcagagtgccgaaaacaaaaaacatccaaatccgtctgccgaaaggatcgtatcagcttgacagactggcgctttatgaagaacgatacgatacgctgaaaagcgcataccgaaaagcggaaaaagaaccgcgggccgatctaagctggcgcggaaatacgcttcatatctcgtatgataacaaaacccgcgcgccgtatatcatgcttccgattccatatgaaaaaggctgggagctgaagataaacggcagaaaagagcagattgaaaaagcggattattcctttatcggattaaaagcgcaaaaaggaaaaaacgatattcaattaacgtatttcccgccgttttttaaacccgcggccgctctatcggtgatcagcctcgtgtttgcggctatatatgtgagaagacaaaagaagcccggctcttaaacagagccgagctttaattttttctgcaatttttcctcgctgaaaatccagcccgtgtaagaagagagaagctctaaatcatgactgaggtggacgatggcgacaaaaggatagtggcctttgctccggtagcgcaaatcaataaagcgcacctcataatgatctttaaaggtatcgacctcccacctgtaaacgggggaaaatgaaagaaaggctgcaatattttcgtcctgtttcgcggccttcatcacatcggtttccggaacgggcacgcgattgaatgtatccaatatcacgacatggccgtcaaagcttctgccgacataaaaggcatgcgccgtcgtcacggcgatacgccactgcctgaatttcatcgtcggcgaaataatgatggtttcaatctcctcttcaatcatttcgcgcagccttcgctttatccgcagctgcatcaaaaaccggacggcgtaatatcctgcgaggatgatataaagcatcagaaatgtcacgcccggatgacctccgatataccacacggcaatcgcggccaaatggctgacgaaaataaacggatcaaaggtattgattaaaccgagagcgatccattttcgcgaaaacgggcggatggcctgcgtgccgtacgcgttaaaaatgtcaacaaacacatgcaaaacgacagcgagaagcgtccacagccacaggtgcaaaaagttcgcttccggataaaacataaacaaaatacccggaatcagaacggaccaaaataaaacggcgggaatggagtgcgtgaaccctctatgatttcgaatataaacggcattatttttcagcttcaatatggtatcaatatcaggtgcctgagagccggcaagagcggcgatcataactgcctgagacatgggggtgtgcatgccgacggcaggatcaagagttgcgattccgccaagcgcgatacccatgacaacgtgagtgccagtatccattgttgacctcctagcaggcgttaacaatcagtcgcccgcatatttcgcattataagatattccccattttctgtttgcccaatcatggcgtttatccgccgttctcatatgtttccgctttttctttatcactatttaatgtaacatattatcgtaacgtgccctaagtttacaccaaaatacggtgtcaagaaaagcggaacccgaaacatctgaggagaagatatgaacgcacttgaagaaaaaatgaaacaaaaagatatagacaaatttcgcgaggacttaattacatggttcgaaagagaacagagaattctgccgtggagagaaaatcaggacccgtatcgggtgtgggtgtcagaggtgatgctgcagcagacgcgcgtagaaaccgttatcccttatttccggcggtttgttgagcaatttccgaccgtttcggcgctcgctgaagccgatgaggaaaaagtgctcaaagcctgggaaggcctaggttattactcccgtgtaagaaatctgcaaagcgccgtaaaagaagtgcatgagcggtacgggggagtcgtccctgccgaggaaaaggaatttggcggactgaaaggcgtcggcccttatacaaaaggcgccgtgctcagcatcgcatacaacaaaccgattcccgccgtagacggcaatgtgatgcgtgtcatgtcgagaattctttccatatgggacgatatcgcaaaacctaaaaccagaaccattttcgaacaggcggtatccgctttcatttctcatgaaaaaccatctgaattcaatcagggtttaatggagctcggcgcaatcatctgcaccccgaaatcgccgtcctgcctgctttgccccgtacaaaagcactgctcggcatttgcggaagggacagagcgggagctgcccgttaaaagcaaaaagaaaaagcccggaataaaaacaatggcagccgttgtgctgacagacgatcaaggcgatgtctatattcataaacggccgccaaaaggcttgctcgccaacttgtgggagtttccgaataccgaaacccagaaaggaatcaaaaccgaaagagagcagcttgaagcctatttagaaaaagagatgggaacaaccgctgaaatcggggagctggaaggcatcgtagaacatgttttcacccatctcgtctggaatatttcggtctttttcggtaaagtaaaacaagtgtcggatacaacggaattcatacgagtcacaaaagaggagctcgaggaatacgcatttcccgtttcccatcaaaagatatggaaaatggcggaagaaagcggccgcctgtaaaaagcgtcagtcatagctgacgcgagtgccgtggccgtaatccgcttcattccgtttcagtccgccgcgggcttcgatttcctgaatcagttcccggtatttggactggccttcttcgtttaaatacggcataatttgctggaaggcatgatggaaataggcgagctctgaatctctccaatcttttttgggcatcatggccaattcgcccatatcacgtccgacatacatataaaagacccctttcaacacatattgcttttattgtttgttgaatgaaaagaactatacacagcaaggagctgaggaaaaatggaacaaaataaatgcgcactgatcacgggaagcagccgcggcgtcgggaaagcagccgccatcagactcgcggaaaaaggatacaacatcgtcatcaattacgcccgcagtaaaaaagcggcattagaaaccgccgaagaaattgaaaaactcggcgtgaaaacgctcgtcattaaagccaatgtcggccagccggcaaaaatcaaagacatgttccgccagattgacgaaacattcggcagactggacgtgttcgtcaataatgcggcttcaggcgtgctgagaccggtcatggaactcgaagaaacacactgggactggacgatgaatatcaatgcgaaagcattgcttttctgcgcccaggaagcggcaaagatgatggagaaaaacggaggcggccacatcgtcagcatcagctcgctcggcagcatccgctatcttgaaaactatacgacggtcggagtctcaaaagccgctttagaatcgttaacccgttatctggcggttgagctgtcttcgaaaaatatcatcgtaaacgcggtgtcaggcggagcgattgatacggacgcgctgaagcatttccctaacagagatgaactgctggaagatgcccgccaaaatacgccggccggcagaatggtcgaaattaaagatatgatcgatacggtggagtttttagtttcttcaaaagcggacatgatccgcggccagaccattattattgacggcgggcgttctctgctcgtataagttttaaaaaaagatgaatagccttatcgtctcctgcgcattctaaagtgcgtggaggtgataacaatggcaaactcaaaattcagcaaaacagacgttcagcaggtgaaaaaacaaaaccagcaatcagcttccggtcagggtcaattcggcactgaattcggcagtgaaactgatgtgcagcaggtaagaaagcaaaaccaatctgctgaacaaaacaaacaacaaaacagctaatcactgaaacgaaaaagcacttcatcttcggatggaagtgcttttttttgttgccaaaacgacaaaacttgtgattcctctacagaatgagtcaaagggttttccggcggaaaatcgaaatggtaaggagtatcaacctaaaagcctaaggaggaacccgatgtcagagtttgaaaagcttgtaagtgaacagatgaaaatcatggatcagcttctcgagctgcagtcagaacttgaccgctgccgccaggtggaagcggaactcatcagtctggaaagagatgcaaagctggacaatgtacaggacgaaattgcgacaaagcgaaaagatctggccggcatacaggagttattccaaaggcagacagagcaagtcatccagtcttatcgcagcacggaaaagccgtcttcctatgtgcagaaatgaatgtgccattccggaagcggagtggttcttttattttcattttttaattcgtaacgttataatagtgaaaagacttgtcggaaagcaattgcggctgcattgactgcagggctttacagaaagtaggggagaaatatgggatatcccaaggaaggagaaaccattcaaattcacagctataagcataacgggctgcttcatcgaatttggaatgaaacgacgattttaaaaagtacggaattgtgtatcatcggagccaacgaccggacaatggtgacggaatccgacggacggacgtgggtgacgagagaaccggcgatctgctactttcatgcccgtcagtggtttaacgtcatcggaatgctgagagatgacggggtacactattattgcaacatcagctcgccgttcgcttatgacggagaggccatcaaatatattgattacgatttggatgtcaaggtgtttccggatatgacgtataacattcttgacgaggatgaatacgatgaccaccgcaaatcaatgaattaccctaaagagatcgacagcattctgaaggagtatctgaatacgctgctgcactggattcatcagcggaaaggaccgtttgctccggaatttgttgatatgtggtatgaacggtatctgcgatatacaaaataaagaatacaataaaaaaaacctgttggggtgtcaacaggtttttcacatgggctcacacgccttaaagagagagggggataaagtgtgggcgtaatcagacgctatatgcaatttgtaaaaccttataaaaaacaaatttttatcacagtgttaatcggcatcataaaattctccatcccgctggctctcccgctgctgttaaaatacgtggtcgatgacattattcaagggagcggaacggcaagcgctaaaacatcatcgctattcacgataatgggcatcatgttcgtgctgtttttaattctgcgtcccccggtagagtactatcggcaatacttcgcgcaatggacgggcagccgggtgctctatgatatcaggggggtattgtttgatcatattcaaaaattgagcctgaggttttatgccaacacgagaacgggcgaagtcatttcccgggtgataaatgatgtcgaacagacaaaagactttgtcataacgggactgatgaatatctggcttgatatgatgacggtgctgatcgtcatctgcattatgtttacacttgatgtcaagctgacattgatatctgtcattttgtttccgttatacggaatttcagtgaaatacttttacggccgcctccgaaaactgacacgtgagcgttctcaggcactcgcccaagttcagggacatttgcacgaacgagttcaggggatgcccgtcatcagaagttttgccattgaagattatgaacaagccaattttgatgaaaaaaacggacattttctggacagagcgatccgtcatacgaattggaacgcaaaaacgtttgcagtcgtgaataccattacggatttggcgccgctgctcgttatcgcgtttgcgggttattttgtcataaacggtccgctgacggtagggacgatggttgcgttcgtcggctatattgacagaatgtacaatccggtcagaaggttgatcaactcatcgacgacgctgacccagtcgatcgcttcaatggaccgcatatttgaatttatcgacgagccgtatgaactgactgataaaccgaatgcagtaaaagctgacggcattaagggcgaagttgaattccggaatgtctcgttccgttatgaggaaggaaaagaaacgattttgcaggacgtttccttaaaggtgacaaaaggggaaaccgtcgcgctcgtcgggatgagcggcggcggaaaatcgacgcttgtcagcctcataccgcgtttttatgatgtatccggcggcagcctgctgattgacggcacagatattcgcgattatgaagcgagaagcctccgcaatcaagtcggtatggtgcttcaggatacgtttctgttcagtgagacgattcgtgaaaatatcgccatcggtaaaccgggagcgtctctggatgaggtggttgcggctgcgaaagcggcaaatgcccatgaatttattatgaatttccccgaaggctatgaaaccaaagtcggcgaacggggcgtcaaattgtcaggcgggcagaaacagcggatttccatcgcgcgtgtattcttaaaaaatccgccgctgttaatcttggatgaagcgacatcggctcttgatctggaaagtgaacactacattcaggaagcgatggaaaagcttgcgaaaaacaggacgacatttatcgtcgcccacaggctgtccacgattacgcacgcggataaaattgtcgtcatggaaaacggcgccgtcgttgaaaccggcacgcacgaggaattaatggcccaaggcggtcagtacagacacttatttacgattcagaatttgaactgatacaaaaacgtatgccgtccgaatgggcggcatacgtttttttaaatgcaaaaaaacccggttatctagagcaccgggttactcatcatcgtctgtttctaattcgctgtctttcgggtggtatgtctgaaaactcgtaattaatgtatcgagatgctccagctgctcgcggtattccgcaactgcagccataatgctgagcatattgtaatcaagcagttcatcctcgcagttctgctgatttttcaagaaagacttcgtcaaaagctgtttatatcttatgctttcttcagcatcgtcatcatgcggtttgatcttgccgaccgtccgcatcagaatcctttcgtgccaatgaagcagataatcaatttcttctgtcagcgtctcctgaaattcctccggcatatgataaatctcgttttcatagcggtgcagctttttcagcgtatcaagcgcccgattcgccgttataatcgcctgtctgaataaaacaagcttgcgcgactttacatacgtcgttttcttaaagtagcttctctcctctttataaagaaggtacgtatgatcaagcttcatcatcttttccttcagcttctcaatatcctctttcaatatcgagtgttccgtggactggcgcatcgtcagcctgatccatttcatgatctcatcggtatattcaaccgtatgatgagtcagcttcgtttcgtatttcggcggaagaaacacaaggttcacaataaaagaagacagcacgcctaaaataacggtgcttgttcgtatcagagcgaacgtcaggaagctgtttcccggtgtttctaaaatcgcgataaccgtcacgagcgcaatcgaaatggtgtgttcaattttcagttttaacatgatcgtgatgacaatcactgcggtcaatccgatcataatcggactcggtccgaaaatcagtccgaatgccgtagcgatgacagcgccgatgatatttgcctgaacctgatcaataatgataagaaaagacctgtaaatagagggctgtatggcaaatatagctgcaatcccggcaaagatcggcgacggaagtccgatccatgatgctaagtagagcgcgagcgtaatcgcaatccctgtttttaaaatgcgggcaccaagtttcattggtttgtgcgtgcattcctttctctaataaattatgtgccgaacgaacggctgacacttacatttccctgttggctgatttgctaaacaataaagtaatatacagggatcataccaattattcaaggtctttttttgaaaaaaccattatctcacaaatcggacaaaaagaaaaagcggaagccccgggctcccgcttgtttcagcagttattttttcatatgtctgaacgcatcttcaacggcttgtaaagtggcgtcgatatcctcttcagtatgtgcggttgtgataaaccaagcttcatacttcgatggagcgagattgatgccgcgctcaagcatcagcttgaagaacttggcgaatgcttctccgtccgtattttccgcctgctcgtaattgacgatcttttcatcagtgaagtaaaccgtgagcgcgccttttaaacggttgacggtgatggtaatgccatgtgtctccgcatgggcgagaatgccttgctcaagtctggcgccgagctcatcaagccgctcataaacgccttcttccttcagcacttccaggcaggcgatgcctgataggatagatgccgggtttccggccatcgtgccggcttgatatgccggaccgagcggagcaacctgctccatgatctcttttttgcctccgtaagcgccgatcggcaagccgcccccgataattttaccgagcgccgttaaatcaggcttcacttgaagaagatcctgcgcgcctccgtacataaaacggaacgccgtgatcacttcatcataaatgacgagcgcgcccgctttatgggtcaattcatttacctgttctaaaaatccttcttcaggttcaacgatgccgaagttgccgacgatcggctcgacgagaaccgctgcaatttctgaaccccatttatccatcgcggctttgtagctttcaatatcattgaaaggaacggtaatcacctcattggcgatgcttttcggcacgccggcggaatcaggggtgccgagcgtagacgggccggaacccgcagcgacaagtacgaggtcagaatggccgtgatagcagccggcgaatttaatgatttttgtccggcctgtataagcgcgtgcaacccggatcgttgtcatcaccgcttcagtgcctgagtttacgaatcgtactttatcaagtgaaggaatggcctccttcagcattttggcgaaagtgacctcatgtttggtcggcgtcccgtacagcacgccgttttcagcagctgttttaatcgcttcagtaatatgcggatgggcatgtccggtaataatcgggccgtaagccgctaaaaaatcgatatactgattcccgtctatatcccagaaataagcgccgttcgctttttccatcgcaacgggtgaaccgccgcctaccgctttataggatctggacgggctgttcacgcctccgacgatatgctctaacgcttccttatgaagttcaactgattttgtatacaaaaaatgaccctcctaatatctccttacatcatgttctattgtagcatgcttcattgcgagcacaacggttcatgcttccagaaaagagcggggggataacggttgtaatcttaacgtgaattggatacgcttaataaaaaacccggaggtataagaaatgagtattgaaatcggacaaacagcaccggatatgaaattagtgaatgacagcggggaagaagtagcattgacggattttaaagggaagtacgtcgttctctatttttatccgaaagacatgacacccggatgcacgacggaagcatgtgatttccgtgatcagcacgaaagtttcgcgggacttgatgcggttattatcggagtaagccctgacagccgtgataaacatgaaaaatttaagcaaaaacacgatcttcctttccagctcctcgttgatgatgagcacaaattggcggaagcttttgatgtgtggaagctgaaaaagaattttgggaaagaatatatgggtatcgagcgatccacttttttgttagataaagaaggccgtcttgtgaaggagtggagaaaggtaaaagtgaaagatcacgttgccgaggcgcttcgagaattggaacaaattgcgtctaattaatggacaaatgctgaactcacggggttttcttcagattacatttgacaggagaccggaaaaagatgtacactaattataaacattataaagtaagaatcttttttagaagagaggtgcatgacggatggctgcacatgaattaaaagaagccttagacacgttgaaggatacgggagtccggattactcctcaacgtcatgccattctggaatatctcgtggattctatggcacatccgacagcggacgatatatataaagccttggaagggaaattccctaatatgagtgttgcgacagtgtataacaatttgcgtgtattccgggaagctgggcttgtaaaggaactgacgtacggagatgcgtccagcagatttgactttgtcacctctgaccattatcacgccatttgtgaaagctgcggaaaaatcgtagacttccattatcccgggcttgacgaagtggaacagcttgcggctcacgtcacggggtttaaggtaagccaccaccgtttggagatttacggcgtctgccaagaatgttccaaaaaagaaaaccactaaacgaagctgaccgctttgatacggtcagcttcgtttattttgcactgttttttctgttataagactcatcgaacgctttgccttccaatcctttatccaatgtaagcggctctctgcaatgcatgcacatatccactctgcccagaatcttcgtttctttctcgcaagcggggcacatcacccggaccgcttttgtggacagcatgccgatccaaaaataaacggcggtgctgagcccgatcgacagcaggccgagaatcataaacaagctggcaagcaaaacagactgcttaaagaacagcccgatgtacataatgataaacccaacgaaaaccaaacttaacgcaaacgttctgatcttattaattttgcttgagtatttcgccatgtccatccccctcccgtttaactatagcacaaaacagatggcatattcttcatgttttcgtaagaaaagggaagaataaatatggcacctgaaaggaaatttgttataatagtgcaatgtgtttagaaaaaaggactttcatgttttatcatagaaatgtagaaacaatagctagtgaaacaatcgcattggaggaatcgtaatggacaatcttctccgtccaatttaccaagaaagagcaagtcatcccgatacgctggccgtccttatgattgagagaaggagtaaagcatcatccatcacggataactttgatgcggtcatgcttgtcattgtcaaacaggctgatgaacctctttttataaagcattatgaattcgaacaaaaaaccgcttctttacatattgtaacggatgctctgcttcaggaatggattctgcttgggaccaatagaagagtcatagattggatcatcaacggcaaagtactgtttgaccgcaatgaatatatatctgaactcaatgaccggctcagcacttttcctttcgccgagcggaaattaaagatcggaatggaatacggcaagctgatcagaagatttgtagaaggaaaagcgttttttgaagctgatcattttctggatgcatattatgcggtagtgcatgctcttcaccacttggcccgcatagaagtgattgaccggggattttatcccgaaacgacagtctggaaccaggtccgtcacattgagccgcaggtatataagctatattccgaacttgtcgagagtcacgaaagtttggagaaaaggctcgaattattattcttagcaaatgattttctcatccattcaaaagctgaaatcggttctgcccacctttttcaagtgatgaaagaaaaagaaatgtggcagtttggagaattgcttcagcaccctgaactggtgcacttcacccaagatcttggtgttatgcttgattacctgacggaaaaaggctttgttgaagtatctcaaatagagaccaaagggcaggaagtatatcatcgaggatattctttcaaaaaaagtgttgacgctgaatcataggcatggtatattattaaacgtcgctgatgcgcttcaacaaaaagctcacagcggcggagaaataaaaacaaaaaacatttgacagcaaatcgctgaaatgttatactgaaaaagtcgcctcaagatgaggttgagatgatctttgaaaactaaacaagacaaaacgtacctgttaattcaaagttttaaataaatcgcacagtgatgtgcgtagtcagtcaaactactttatcggagagtttgatcctggctcaggacgaacgctggcggcgtgcctaatacatgcaagtcgagcggacagatgggagcttgctccctgatgttagcggcggacgggtgagtaacacgtgggtaacctgcctgtaagactgggataactccgggaaaccggggctaataccggatggttgtctgaaccgcatggttcagacataaaaggtggcttcggctaccacttacagatggacccgcggcgcattagctagttggtgaggtaacggctcaccaaggcgacgatgcgtagccgacctgagagggtgatcggccacactgggactgagacacggcccagactcctacgggaggcagcagtagggaatcttccgcaatggacgaaagtctgacggagcaacgccgcgtgagtgatgaaggttttcggatcgtaaagctctgttgttagggaagaacaagtgccgttcaaatagggcggcaccttgacggtacctaaccagaaagccacggctaactacgtgccagcagccgcggtaatacgtaggtggcaagcgttgtccggaattattgggcgtaaagggctcgcaggcggtttcttaagtctgatgtgaaagcccccggctcaaccggggagggtcattggaaactggggaacttgagtgcagaagaggagagtggaattccacgtgtagcggtgaaatgcgtagagatgtggaggaacaccagtggcgaaggcgactctctggtctgtaactgacgctgaggagcgaaagcgtggggagcgaacaggattagataccctggtagtccacgccgtaaacgatgagtgctaagtgttagggggtttccgccccttagtgctgcagctaacgcattaagcactccgcctggggagtacggtcgcaagactgaaactcaaaggaattgacgggggcccgcacaagcggtggagcatgtggtttaattcgaagcaacgcgaagaaccttaccaggtcttgacatcctctgacaatcctagagataggacgtccccttcgggggcagagtgacaggtggtgcatggttgtcgtcagctcgtgtcgtgagatgttgggttaagtcccgcaacgagcgcaacccttgatcttagttgccagcattcagttgggcactctaaggtgactgccggtgacaaaccggaggaaggtggggatgacgtcaaatcatcatgccccttatgacctgggctacacacgtgctacaatggacagaacaaagggcagcgaaaccgcgaggttaagccaatcccacaaatctgttctcagttcggatcgcagtctgcaactcgactgcgtgaagctggaatcgctagtaatcgcggatcagcatgccgcggtgaatacgttcccgggccttgtacacaccgcccgtcacaccacgagagtttgtaacacccgaagtcggtgaggtaacctttatggagccagccgccgaaggtgggacagatgattggggtgaagtcgtaacaaggtagccgtatcggaaggtgcggctggatcacctcctttctaaggattttaacggaatataagaccttgggtcttataaacagaacgttccctgtcttgtttagttttgaaggatcattccttcaaaacataggaacacctgctaaatgcgccacttcctgtggcaacgcatgtgttagcatgtcctatgcgttgttctttgaaaactagataacagaagtaattcacattcaattagtaatgcaagatatcacgtagtgattctttttaacggttaagttagaaagggcgcacggtggatgccttggcactaggagccgatgaaggacgggacgaacaccgatatgcttcggggagctgtaagcaagctttgatccggagatttccgaatggggaaacccaccactcgtaatggagtggtatccatatctgaatacataggatatgagaaggcagacccggggaactgaaacatctaagtacccggaggaagagaaagcaaatgcgattccctgagtagcggcgagcgaaacgggaccagcccaaaccaagaggcttgcctcttggggttgtaggacactctgtacggagttacaaaggaacgaggtagatgaagaggtctggaaaggcccgccataggaggtaacagccctgtagtcaaaacttcgttctctcctgagtggatcctgagtacggcggaacacgtgaaattccgtcggaatccgggaggaccatctcccaaggctaaatactccctagtgaccgatagtgaaccagtaccgtgagggaaaggtgaaaagcaccccggaaggggagtgaaagagatcctgaaaccgtgtgcctacaagtagtcagagcccgttaacgggtgatggcgtgccttttgtagaatgaaccggcgagttacgatcccgtgcaaggttaagcagaagatgcggagccgcagcgaaagcgagtctgaatagggcgaattgagtacgtggtcgtagacccgaaaccaggtgatctacccatgtccagggtgaagttcaggtaacactgaatggaggcccgaacccacgcacgttgaaaagtgcggggatgaggtgtgggtaggggtgaaatgccaatcgaacctggagatagctggttctctccgaaatagctttagggctagcctcaaggtaagagtctcggaggtagagcactgattggactaggggcccctaccgggttaccgaattcagtcaaactccgaatgccgatgacttatccttgggagtcagactgcgagtgataagatccgtagtcgaaagggaaacagcccagaccgccagctaaggtcccaaagtatacgttaagtggaaaaggatgtggagttgcttagacaaccaggatgttggcttagaagcagccaccatttaaagagtgcgtaatagctcactggtcgagtgactctgcgccgaaaatgtaccggggctaaacgtatcaccgaagctgcggactgttcttcgaacagtggtaggagagcgttctaagggctgtgaagcaagaccggaaggacttgtggagcgcttagaagtgagaatgccggtatgagtagcgaaagaggggtgagaatcccctccaccgaatgcctaaggtttcctgaggaaggctcgtccgctcagggttagtcgggacctaagccgaggccgaaaggcgtaggcgatggataacaggttgatattcctgtaccacctcctcaccatttgagcaatggggggacgcaggaggatagggtaagcgcggtattggatatccgcgtccaagcagttaggctgggaaataggcaaatccgtttcccgtgaaggctgagctgtgatggcgagcgaattatagtagcgaagttcctgattccacactgccaagaaaagcctctagcgaggtgagaggtgcccgtaccgcaaaccgacacaggtaggcgaggagagaatcctaaggtgatcgagagaactctcgttaaggaactcggcaaaatgaccccgtaacttcgggagaaggggtgctctgttagggtgcaagcccgagagagccgcagtgaataggcccaggcgactgtttagcaaaaacacaggtctctgcgaagccgtaaggcgaagtataggggctgacgcctgcccggtgctggaaggttaagaggagcgcttagcgtaagcgaaggtgcgaattgaagccccagtaaacggcggccgtaactataacggtcctaaggtagcgaaattccttgtcgggtaagttccgacccgcacgaaaggcgcaacgatctgggcactgtctcaacgagagactcggtgaaattatagtacctgtgaagatgcaggttacccgcgacaggacggaaagaccccgtggagctttactgcagcctgatattgaatgttggtacagcttgtacaggataggtaggagccttggaaaccggagcgccagcttcggtggaggcatcggtgggatactaccctggctgtattgaccttctaacccgccgcccttatcgggcggggagacagtgtcaggtgggcagtttgactggggcggtcgcctcctaaaaggtaacggaggcgcccaaaggttccctcagaatggttggaaatcattcgcagagtgtaaaggcacaagggagcttgactgcgagacctacaagtcgagcagggacgaaagtcgggcttagtgatccggtggttccgcatggaagggccatcgctcaacggataaaagctaccccggggataacaggcttatctcccccaagagtccacatcgacggggaggtttggcacctcgatgtcggctcatcgcatcctggggctgtagtcggtcccaagggttgggctgttcgcccattaaagcggtacgcgagctgggttcagaacgtcgtgagacagttcggtccctatccgtcgcgggcgcaggaaatttgagaggagctgtccttagtacgagaggaccgggatggacgcaccgctggtgtaccagttgttctgccaagggcatcgctgggtagctatgtgcggacgggataagtgctgaaagcatctaagcatgaagcccccctcaagatgagatttcccattccgcaaggaagtaagatccctgaaagatgatcaggttgataggtctgaggtggaagtgtggcgacacatggagctgacagatactaatcgatcgaggacttaaccaatttgaatgtatgcttactgttatctagttttgagagaatttttttaaaaaaactcttgctttttctgaaatacatagtataataatacatgtcactaaaatgtctggtgatgatggcgaagaggtcacacccgttcccatgccgaacacggaagttaagctcttcagcgccgatggtagtcgggggtttccccctgtgagagtaggacatcgccaggcagacttcattccgcagtagctcagtggtagagctatcggctgttaaccgatcggtcgtaggttcgaatcctacctgcggagccatttatggagagctgtccgagtggccgaaggagcacgattggaaatcgtgtaggcggtaaccccgtctcaagggttcgaatcccttgctctccgccactaattatcaatacataacaaacgaaaaaataccagggcccgttggtcaagcggttaagacaccgccctttcacggcggtaacacgggttcgaatcccgtacgggtcacttatatgatggaggattagctcagctgggagagcatctgccttacaagcagagggtcggcggttcgagcccgtcatcctccaccattatcatcgcggggtggagcagttcggtagctcgtcgggctcataacccgaaggtcgcaggttcaaatcctgcccccgcaaccaaaaaaatggtccggtagttcagttggttagaatgcctgcctgtcacgcaggaggtcgcgggttcgagtcccgtccggaccgccatttataaaaaggctcggtagctcagttggtagagcaacggactgaaaatccgtgtgtcggcggttcgattccgtcccgagccaccatttgccggtctagctcaattggtagagcaactgacttgtaatcagtaggttgggggttcaagtcctctggccggcactctaaatgatggaggggtagcgaagtggctaaacgcggcggactgtaaatccgctccctcagggttcggcagttcgaatctgcccccctccaccattttaaataggggcatagtttaacggtagaacagaggtctccaaaacctccggtgtgggttcgattcctactgcccctgccactattttatttattcatcttcagattatggcggttgtggcgaagtggttaacgcaccagattgtggctctggcactcgtgggttcgattcccatcaatcgccccattttatcattgggctatagccaagcggtaaggcaacggactttgactccgtcatgcgttggttcgaatccagctagcccagttgcattttttaaaaaacaacagcataagatgtattaagttcttttacatgttgcggaagtagttcagtggtagaacatcaccttgccaaggtgggggtcgcgggttcgaatcccgtcttccgctccaaattacggcggcatagccaagtggtaaggcagaggtctgcaaaacctttatccccggttcgaatccgggtgtcgcctttctattgccggggtggtggaattggcagacacacaggacttaaaatcctgcggtaggtgactaccgtgccggttcaagtccggccctcggcaccaatttaactttgaacgaactatgttaaattggtcatcagttttcacattataaaacatatatgagagtgatttgcatattgcagatcactttttttatataataaaaacgtaatgaccatcaatataagtttcttgcttgtatcgtatatactgcattaccatttaaaaaactttgctaaaaccgttgacgttttatgaaatacatgttatatttatatacgtcgattgaacacgacgcattacatgccggtgtggcggaattggcagacgcgcacgactcaaaatcgtgttccttctggagtgccggttcgaccccggccaccggtattaactttataaaacgtcaattaaagaagaattaagtaatattaacgtttttaacgtctttctacagtagtgtaggaaggcgttttttcttgttttaatggcttttattcacatgacaatataatttcaaatcgtgtgcactaatcgtgttcacagagaaagaggaattgtcatgatggctagacgtaaaaacatcttagacaaaaagggattgggtatgggtatcttagaaagcgaaacaaagtcatatgtagaatcatttcaggaggcaataaactgtgagttgcgaaaatttaagatcacacactataaaataatacacgaatgaatttagtgcttttttgataaacttaagagatcaaagaatagatactcaactattaaatccgtacaactttactgaagaacacgcaaaggaaaatgtaatactgtacatgaagaattataaagggaacaggataattactatcaatgctcgcttaagggctttacgtgcttttttaagagatttagtgttaaaattatcctgtgaagttattacctaaggagagatgagtgtgggtgtagcaaaaaagaacaaatacgacctaattttacaaaatcaaattgaagaatctatagaagagtatcttagtgagcgtggaagtaatgactctgtaagtgtcggggacagtttttgtgagtggatactttataacatattcgagttaagagaagacgaagtagcagaagctaaagaaataggtgggaagtttgataacggtttagacgcggtttttgaatataacggtgaagttcacttattacaaagtaagtataagacatcccataatattgactccacacaaaggtttatagctgattgccaacgagtttgtatagaagaaccaactacagaaagagattctgtaaaagaagcatgtaaaaatgttagagagtcatatcagaatgatgagactataaattgttactatattacgaacaaccatataagtgattgggaaagagtgcaaataaaatccaacttaaaacatcttagtatggaatttaagaatttaaatttcttcttacatgatttagatgatattcaggaaagtatagaaataaaaaagggactgttaccaaaagactttcgtgaaaaaacgttcaggttgaatatagaagagaatttctctactttcgaaacgactgtagcaaaagtaagagttaaagacttttctcaatttgttaacgaaggtgaaaaccttctcttccattcaaatataagaaactatctaaagagtactaaaattaacaaaggtattaaagatactataagaaatgaacctgagaacttttggtattacaataatggggttactgtggtttgtgatgagtactatgagactatggggagtttagtaatgaaagcaccgcaaatagttaatgggtgccaaactgccaaaactctgggggatttctataagcacaagaccaataaagaactctctgctttagaatccaatggacacttgcttgtgaaagtgattaaaactaaacgaagtgctgaggaatctcaaaagaaagagttaagagacaatattacaaggtacacaaatagccaaaatgctgttagagggctggatttttatgctttagacagatttcaaaatggcttaaaagatcgaatgaaaaatttgggttatttttatgaaatacaaagaggggcgttcataactttagatcgaaaagaacaagagtcctatagaggtaatgatagttataattatttgcttggaagtgttaatagaaagaaaaaatacgttctgcctgcaaaagaagtaattcaatcttttacagctgctataaaactaatgccgaatgtagcttatgggcgagctaacgaattgactccagtaggtagtaggtggaaagatataatgaatgaagaaactaaaggtctacctttagaacattttctctttccttatttaattttaatgtatgctaaagaagaactaaaatataagagtggatcaaatgactttagagttaattcagcattcctttttattgcaacatattatttactaattacagaaatggtcaataaacatgcagataaggaatacgattctgccgacaaaataaatgttgaagtttttaaagatatctttaataatcagaaccttaataagcaattgttactgattactaatagaacgcttaggtcattctttaaagatttttcaattgaagaagcaataggagataacttaagaggtttcgtacaaaataaaatgaaaaaaggaagcacctactggattatccttgaaagaaaaatttatcataatctagatgatttagaatttgagaatattgaagtttatgaagagataaaggcaataattttaaaacatgtctaacgttacaatattgtccctggtaacataatgcacaaaaatattctttatttatctctgcagaatatagtattgttaagaacaagtcgtgttaatacaaaattattctagacttaaattatctgcagaattacttaataccaccgggaaattaacgataataaaattaggtgcagaaggaacttttcgactcaaaatcgtgttccttctggagtgccggttcgaccccggccaccggtatacaaaggcttctacaatatgtagaagccttttttgttgtgtgaaaatatcctccaaggcttgtgaaaacatgatacgcgtgcagattgtataaatacgcttttttcaaagatactaacaagaagttctttgaaagaggtgttttttatggaagggacttggacttgtcttatcccatttattctggtcattcccatttcaatcattacaaagcaagtgcagtccggtctgtttgtcggtttgctggtcggaagctatcttttgcatcccagcttgcttggcgggattgaacatatggttcaatatgtaatcagcaacattgtcgtcaccaataatattagaatcattgtgtttctatattcatttgccggccttgtagggattataaagctgaccggcgggataaaaggattcgtccatttgatcagtaaaaaagttaaaaccaaaaaaggtgcgatgctgcttgcatggctgtcgacatttggcacgttcagtgaaccggactttcgcatcgtcacaattgcaccgatcatgaaagcattaagcaagcgtctggatctgtcgaaacagaaaattgcgtatgccattgagtttacggcaaaccctgtcattgccttgattccgatagcaacggcatttgtcggctacatggtttctattatcggacaggccctcaaaacgtcaggaatagatcagccggcttacacggtgtatgtgaaaagtattcccttcaattttttctccattgtgattatagtagtcggaatttattactgcttttctaagaaacaaaaagcagacgaaagcttagaaaaaacagaaaagagcggacaaacttctgctcgcaaacataacaaaaatacggaaccgattccgcggaacagcggtgtgttgctttcaaaaggctcaggttcattcaacatggaaacagggacgatctcagatattcacggtggacatacgggaatgttcgaaagtgatgagcatgctgaccagcaggaggagctggattcggcgcaccgtgcttatattaacgaaacaccgattcggccgtggaatttaatcattccgatcgggctgtttttgctattaacactctttctcagctggtgggacagccattcaaaagcacaagggtttttgaatgcttttatcaaaagcgatatgcttggcgtcatgttaaccgcattattggcagcggttattgcagcatttgctctttttatgtttcagcgttttcatgcaggcgagcttgttacccattttattaagggcggaaacgaattggtcaacgttattattatgttatcgctgatttgggccgtaacagcagtatctgaagatctgggattctcgaaatatgttacttctcatttaacgtcatggatccctcatatgtttattgcgccgtctctttttatactgggggctgttatatcctattttatcgggtcatcctgggggacttgggggatattaatgccgctcggcgtaacgctggcggtacagtcacataccagcttattattagcgatcggggccgtgttcgcgagcggaacatttggagcgtttgcttctcctctcagtgataatacggtgacaacctgtacggtgttggggatcgatgttgtgaagtatgcccgttcgaagcttgttccggcgcttatcgccgcggggatctccgttgtgttatacggtgcgttttcatttttcagataacatatactttttaaagaataacgcctttttatgagctgttatactagaggaaaaaagaggtgatgacattgaagcagattattgcaatgggcggcgggggcttttccatggagccggatcatcttgtgctggatcagtatattttagagcagtcggcgcggtcaaagccgaaaatttgttttttgccgacggcaagcggagattcggagaattatatcggcaggttttatcaggcctttcaaaagctgcggggtgagccggatcacttgtcgctgtttaaaccgccgggttctgatctcagatcctttctcatgaagaaagatattatatatgtcggcggcggaaatacgcgcaatatgcttgtcttatggaaagagtgggggcttgaccttattcttcgtgaggcttgggaaaacggcatcatgttggcgggtctcagcgccggggcgatttgctggtatgaagaaggattgacggattcggctggagatttgagagagttaagagctttaggatttttgccgggaagcttttgtccgcactatgacggagaagcggagcgccggccggtgtatcaccgtctgatttcagaaaagaaactcagggagggctatgccgctgatgacggcgctgcgcttcattataaagacggtcagctgttccgggctgtctcttccagggaaaccgcaaagggttatcgggtttttaataccgaaaaaggcgttcgggaaacagagcttatgaccgtaccgttatctgaattttgataatatgcttttttttgtacacaacttatgttacgatgagagcgaaatcaatagttactgggggtgcccgtctgagcgggctgagagagaagcggcggcttcttaaccctttggacctgatctggttcgtaccagcgtggggaagtaaaggttttattattgttgatgaaaacaataatagtttctttctgactgcaaaaccgggttcttctttgaacccggtttttttgtgctggtgctgagcttggttctgttattcaaatgataaaggagagatttgtatgcaaaatcaatcagtacagcaagcgaacatttccattatgtcgagtttttccggcagtaaaaaggtttatgcagaaggttcttcgcccgatatacgagtgccgatgcgggaaatcagcctgagtgcgactacgggggcattcggggaagaggagaatgcgccggtccgtgtttatgatacgagcgggccgtatacagacccagatgtacagattgatattcatgaagggctgggggcgctccgcacaaagtggattaccgggcgcggagatgtagaagaatataatggccggaccgtgagacctgaagacaacggttataaaaaagagggccgtgccgctgaataccccggcctacagcggaaaccgcttcgggccaagccggggaaaaatgtaacacaattgcattatgcgagaaaaggcatcattacgcctgaaatggagtttatcgcaatacgtgagcatgtgtctcccgaatttgtcagagacgaggtagccagcggccgggcgattattccttctaacgtcaaccacccggaaagcgagccgatgattatcggccggaattttcatgtgaaaattaatgccaatatcggcaactcggctgttacatcttctatcgaagaagaagtcgaaaaaatgacgtgggcgattcgctggggcgccgatacgatgatggacttatccacgggaaaagacattcatacgacgcgtgaatggattatccgcaactgtcccgtgcctgtggggacggtgccgatttatcaggcgcttgaaaaagtaaatggcattgccgaggatttaacgtgggacatttatcgtgacacattgattgagcaggcggagcagggcgtggattatttcaccatccatgccggcgtactgcttcgttacgtcccgttaacggctaaacgcacgacgggaatcgtatcccgcgggggggcgattatggcgcaatggtgcctggctcatcatcaggaaagctttctgtacacgcattttgaagaaatttgtgaaatcatgaagacctatgatatcgctttttctcttggtgacgggcttcgccccggttcgattgcggatgccaatgatgaagcgcagtttgcggaattggagactctcggagaattgacggagattgcgtggaagcacgatgtgcaagtgatgatcgaaggaccgggtcatgtgccgatgcataaaattaaggaaaacatggacaagcagctggaaatttgtaaagaggcgcctttttacacgctcgggccattaacgacggatatcgctccgggttatgaccacattacttcagcaatcggcgcggcgatgatcggctggtacgggacggcgatgctttgctatgtcacgccgaaggagcatttggggctgccgaatcgtgatgatgtaagagaaggtgtcatcacgtacaaaatcgcggcacatgccgcagaccttgctaaagggcatccgggtgcacagatccgtgacgatgctctgtctaaggcgcggtttgaattccggtggcgtgatcaatttcatttgtcgcttgatcctgaaagagcaatggaatatcatgatgaaacgctgccggctgaaggcgcaaaaacggctcacttctgttcgatgtgcggtccgaagttctgcagtatgagaatttctcaggatattcgtgattatgcgaaggaaaacggacttactgaagacgaggccgtcaacgaagggctgaaagaaaaagcaaaagagtttgcagagaagggaagccgcttatatcaataaaagaaaagatgaagatggagtttgcccatcttcatcttttttagaaaaacggtgaacggcgaagcggcggaatgctctgctcgaagcggaatatattttccggatcatatttcgttttgacttgacggaggcggtgaacattttctccgtaatacgtttgcagccagtttctgatttctctatcaggccaattcacgtaatctcccatcgtttctcttgatagggacgttctcagtccttcgatccagcggacattttgtctttcttcttcagcagatgtccaagttgtaatatattcttgggcaatgattgcgttgcgatagtagaatgccgtttggtccggagcgatccgtccggccgccccgccgagagattgctgccacacactggcgttttcgttcggagcgtgctctaaatagcgctttaaagtggaaatcgcgcgtgttgataatggtttttcaataaaggatcctgaccgcttcatcttttgcggctgatttcctcccgggctgttaaaaaaggctgccgctttaataaatggcactgtcttgaccatgccgcttgccggttttcccgctttcattaacggagccagcagttctttcagctcatcctttgtcccggtaaattgaccgagcgcttctatgcggttgacttccttaggccaaaactgaattgatgaggtaagccggttgtctgtaaatggagcccagcgctgccatgtgttaaatacttcctcaaaatcatcccagccccaagtgacagaaaaaacagacacgcacgagatcggcacggctttaaacatcatggatgtgacaatgccgaagttgcctccccctcctccctgagacgcccaaaatagatcagagtgctttgaacggttgactgtgatcaagtcagcacccgctttttcgtccgctatgatcatttcgagctggaggagacgatcgcaagtaagtccggctgtccttgttaaatatccgattcctcccccgagcgtcagccccgtgattcccacattcgcaatggttcccgcaggaagggtcaagccgtaccgccagagtgtgcggtagacttcccccaattcggctcccgcttcaatcgagaccagccgcttatcctcatttactcttattttcttcatttcactgagatcaatgactagtccgtcatttaacagggaaaagttttcgtagctgtgtcttccgcctctgatacggaaaggcacattgttctcacgcgcccatctcagcgcattgagggcgtcatgtttgttttgacaaaacacaatgatgtctggatatctttgcaggctcaaattgatattggttcttgcagcattatagtccgggtcatcttttttgacgatgcgaccggtcaatgttgtcttttccacattctcactcactttcacttgtactctgctatgttttctagcatatgcggaaaaatgagagagtgtatgaggaaaacccccggaaggaaacgatattttaaattatagttgacaggtagggattgtatgaattaacataatcattacatatttccaaacgatggctgatcggatcaccgaaggctcttatcttttaaacagataagggccttttttgcgtgaaagtcatgaatgaaatgaaaagcggagggatgaaaagtggcgttaaaaaaggtatcacatgtgcgcaaaaagagcaaaaaacgaaaaaagtacagaaaatacacattgaatttcgaactgcttgtagagaaaaacaaacgggagattatgagaaatgaggaacagatggagcagatttatataaagatagatgaaaagcatgcgggggttcgataaagatgaaggagagaaaatggaggataaaaacaacggtactcgcgctgtcggtatccatcatgttatcagggtgcgcgttagggagcgccggggaagaaccgtcatctgcggcggataaaaaggaagaaacacgtattgcccatgtcaagacaaaggaatttaaagcttctcatccggcggccattcccgctaaatcgaaagccagaactgacacttttgttgctgggatttccacgccgggcggtgtgtttctgccgtacttctacgaaaacggctgggatggaaatgcgacagatcctatttttgaaccgttagtcaaactggataaaatggggaagcctgccccggctcttgcggaaagctggaatatttccaaagatcagcttacctatacgttccgtttaagaaaaaatctcgttttcagcgacggttcaccgctgaccgcaaaggatgccgcattcactctaacactgctgcatgatcctgcatacgcgggctatgaagatatcaccacggcctatattaaaggcggtaaggcttacaaagaaggaaaggcaaagacgatagagggcattcgcgtccttaatgacagaaccattcaaatcacgactgagaaagtcagtgcgaagtcgctgcttcttttgggagggcaggtgctgtcagaagcctactacgggaagaaatatcaattcggcaaactggactatttaaaagagctttatgccaaaccgctcggagcgggaccttatcaatttacagaataccttccgggacaggaaatacgctatcaggctaatgaacactattatgccggaaaaccgaaaacggaaaagctgatttataaaattatcgatccgtcaacttcccttcagctgtttgaaacgggtgaccttgattacgcttctttctcacctgatgatgatacggttcagcatttaaaaagtctcggttttgccaatataagcatatctgtcgtgaatgattacgggcttgtgtacgtcaatcacaagcgtccgccttttcaagataagaaagtgtcccaggcgcttatttacggacttgaccgtcaaaaaatcgtcgatgtccgctttaaacgctacggagaggtcgcgaatgttccggtgtctccggtttcgtgggcttatgatgacaaaggtgttaatcggtatgagtttaaccctgaaaaagccaaaaagcttctcgatgaagcgggctggaaaacgggcaaagacggtgtacgtgaaaaaaacggcaaaaagcttgaaatcagctattacacgtctaaagcggatgatgattttattccgatcgcgaaagaaaattacgcggacatcggaatcgcattaaaaccggaagtgatggattttaatacagaagtagcgaaaataaatgacaaacaatatgaccttgccgccgtttccacctcgcagattcttgatccgaatgacacggtggaaaagctggcttccggccatcccaataatgtaacggggtattccaatccgaaagcggaccggctgatagagaaaggagccggcacgcttgatatcagcaaaagaaaagagatttatcaccagctgtaccgggagctcggggaaaacccgccttacattctgattcattaccgtcagagcgcaagggcggtcagcggaaaaataaaagggcttgagcctgacaattattctggaatcagttcaagtctctcaaatgtctcaattcaatagaacggttgggcaaaatacccggtgcatcctggggattttgccctttcagcggaaaggaggggctttttatgaaacggtatgccgcagaacgattcattcaaatgcttgtgatcttattcggtacgtcctttattatttttttcttattcgccatgctgccgggcgactatattgattccaatgtaaacctgactcctgaaagagcgaaggagttaaaagcgctttacgggctggatcagccgatttggcagcgctatgtgacatggctcggaaatgtgctcagcggagattttgggttttctttgaaatatcaggagaacgtcctgtcactgcttcggaaatatgtctggaattcgttttttgtcgcatttttggcgttgcttgtcacatggtcagccgcgatgataacgggtgtcatatccgctgtcaggaaatactcatggtttgacgggatcgtgacgtttcttgtttttgcttccatggcgttcccgtctttttttatcagccttctgtttattaagtggtttggggtggatttgaaaatattgcccgtcggcgggatgattgataccggaagcacgagtacaggtttttcgtacgtgcttgaagccgccagacatatgattcttccggtcgtgattttatctatgctcggcatcggctcgctgacaaggtatttccgctccggcatgctggacgtgatcagacaggattatatcagaacggcgagagcgaagggattgaaagagcgcaccgtcatctggaaacatgcgttgaaaaacgcgctcattccggccatcaccctgcttgcttttgaactgccgggactgttttccggagccatcattattgaacagattttcgggtggccgggtgtcggacgtattcagctggaatctgtgcattatcgtgattatccggttttgatggcgtttaccttgtttttgtcttgtttaacgattgtggggaacttcttggcggatatcgcttatgccgcggttgatccgcgggtcaggctgaaatagggggtgttcggaatgaaaaaacaaaaaggggtgccgccttctctttggaagcagacgtaccgccgcctgctgcagcataagctgacggtcatcagtcttcttttcttatgttttatgtttttattgtgctttatcgggccgtctttttctccgtacataacagatcggacggatatttcaaatgccaatcagcagccgggaatccatcattggctgggaactgaccagtacgggagagatgtgctgacgaggctgatgctggcggggcagatttctctgaccgtggggcttgcttcaatggtgctgtcgcttgtcatcggttctttactcggggctgcggccggattttatcggggagccgctgatatgatcattatgcgcatcgctgatatgctcatgtccatcccgggcctgccgctgcttttgattttggctgcggtgatgtcggagtggaaagtgccttctgaatacaggatgtacctgatcatgatgatgttaagcttgattggatggcccggtctggcgcggcttgtacgcggacagattttgtcgctgaaggagcagccgtttatgatggccgcggaagttttggggcttagtgataaacggaaaatcctctatcatttgcttcccaatacattgccgttattactggtagcggcgactttgcatgtggcgggagcgatgctgagtgaatcggcgctgagttttctcgggcttggcgttgctccgcccacaccttcttggggaaacatgatggaagcggcgaatcattttatggattttacactccgcccgtggctgtggattccgccgggaacggccatttttctgaccgttgtggcgattcatctgcttggagacggtttaagagacgcttttgatcctaaggtaaaacggcaggtgaaaatgaaatgaaaaaaccgcttttagaagtgaggcatttggaaacggctttttatacagaggagggggcggtaaaggccgtggacgatgtcagctttacgatacatgaggaggaaacggtttgtattgtaggggagtccggctgcgggaaaagcatggcgtcattgtccattatgcagcttattcccgagacggggagaatcgaacggggagcggtgcatttttccggacggaacctgttggaattgaaaccaaaagacatgcagaaaatccgcggcagcgaaatcgggatgatatttcaggaaccgatgacatctttgaatccggtgtttacaatcggtgagcagctggccgaaccgattcgcgaacatttattgctgagtaagaaagaagcatggcggagggccgttgaactgatcacgttagtggagatcccgcatgccgagcaggttatgcaccaatatcctcatgaactgagcggcggcatgctgcagcgcatcatgacggctgtcgcgcttagctgcgaaccgaaactgatcattgccgacgagccgacgacagcgcttgacgtaaccattcaggcgcagatattggatttattgcgggatatgaaaaagcaattccgcacgtctattttattcattactcatgaccttggcgtggttgctgaaatggctgattatgtgattgttatgtatgcggggaaaattgtggaggaaggaccggttgcaaagcttttttctgatccgaagcatccgtatacgaaaggactgctcgcggccaagccggttatcggtcaaagaagagagatgttgtacaccattccggggcaggtccccgagcttgcggacctgtcgggatcgtcttgttattttgcggagcgatgtgaacacagcatggaaatatgccggaaatcgagcccgcattttactgaattcgggaaggggcatcaggcggcgtgctggctttacagagaggagaaagcagatgggtgatgtgttgctggaggtcaaggggctgaaaaaatattacgaggagcatggggggatgagaaagacccgcaaaaatcccgtaaaagcagttgacggtgtcagttttacgatagaaaagggagaagtgttcggcttagcgggagaatcgggcagcggaaagtcatcaatcggcaagaccattttgaggcttcatgaaaaaacagagggagaggtgttttttcaggggcgtgatgtgtttcggatgagtcggcgcgagctcaaaactttcagatcagaagcgcagctcatctttcaagatccgttcagttctttaaatccccggcgtcggatcggagaagccatcggtgaagcgatgatcgagcatcaattggcggtgaagcggaacgcgcgtgataaagcggcggaagttcttgaagcctgcggactttccgcaaactttatcgaccgttatccgcatgaattttccggagggcagcggcagcggatcgtgattgcaagagcgatggcgctcaagccgcaatttatcattatggatgaacccgtggcggcgttagatgtctccatccaggcgcagatgatgaatttgttcagcagccttcaaaaacagcacgggctgtcatatttgttcatttctcatgatttaagcgtggtggagcacttatgtacgaaggtcgccattatgtatttagggacgattgtggaatacgcgtcaaaggaggagctcttttcacggccgcttcatccttatacgaaagcgctgttatcagccgtgcctgttcctgatcccggagcgaaaagggagcggataattttaaagggtgatataccgagcccctctgatccgccttcaggctgtaaattccgaacgagatgcccggcagccaagaagatatgtgctgagaaaagtccggcgctgtcagaaaaagggcttcatcattttgcggcatgccacttcatataattgagaaaaaacggttttattgataatgaacaggaaaaacctaccgggcagacgggactgacccccgtttttgagacagggatcaaaacaccttcatacagccaattgccgatattgtatcggcgattggctgtttagtttcgtttgaatacgaatattgttataataatgaatgtattctatggcagtgcgttctacgatggcggtcgtagttcgatcaatgctgttaagatagaacgtttcagactttagtgaggaatgaaacgattcgatggaggcattatcagcgggtgtccctttgcgggacatgctcatggtaatgccttttgttttaacagctttctgatactcataagatgtataaacagaaccttggtcactatgtaacacgcagttttcaggaagtgttggcagctgatcaagtgtgtctaagacaaagtctgtgtcctgcttatctccaatcgtaaaagcaatcacttctccattgtataaatccaatatactggaaaggtacaattgtttctgtccataaggcaaatatgtgatgtccgttaccagtttttcaagagggcgatcagactgaaagttccgatccaatatattatcgaccacagaatatggctgcccactttttttacgctttttcatcttaacccgacactgccattgatttttctgcataatacgttgaacagatttatgattaatacttattctcttttttagtatggctgtgatttttcgatatccatatcgatacttgtgttctcggcacaacgtgccgatttgtttctccagtcgcatcttaggattactcttagtcagattctttctccatctataatatgaagtgcgtgaaatatctaaatggacacagatgtcctgtaccgtcatcgtcttgcgcaattcttctaccagtttgattgtcgtttccctatcagcttcctttccaattcgttgtacttttttaacacttcattctgttgtctcagataacgattctctgcctggagtttctctaattcagaagaatactccggaccctttccataagtatattgctttccaacaggctgttcgaatcggtgggtatccccagccttatgccatctaacccatgtctgaacctgagtcttatttttgatattcaattcctgcatgatctctttcataggcacgcccgccaatctcattcctacagccttctgtttgacttcaaccggataactcactcttgtccccatagaaaaacacctccaagttttatttcggataacaacggtccgttttcaaacttgaaggtgttttttgtttgtctcatattatggggtcagttccgaccggcaggttttttgatgttattttggtgatggcagtccgagtccttcggcaacgcgtctgccgtattcaggatcagctttgtagaagtggccgatctggcgcagcttaatttcttctttttccacaggtttcatcgcactgacgatattggcaacaaggcgcgcgcgctcttcctcactcatcaggcggtacaggtcgccggcttgtgtgtaatgatcatgatgattatagcttacactgtcagcgaaacctgatacaggatatgccgcctgtttatcttcaggtgactctttcgggccgccgaagctgttaggctcgtaatagacggagcggccgccgttatcatcaaaacgcatttgtccgtcacgctgatagtttttcacttcattgcgggaacggttgatcggcagcgcctgatggttcgcgccgacacggtagcgatgcgcgtcatggtatgcgaacaaccggccttgaagcattttgtcaggtgagacgtcgacgccggggactaatgtgccgggagagaacgtcgcctgttctacttccgcaaagtaattttccggattgcggttcagaaccatgcggccgacttcaatgagcggatagtctttttgagaccatacttttgtgacgtcaaacggatcaaagcgatatgtgtttgcgtcttctaacggcatgatttgaacatataatttccatgcggggaaatcgccgttttcaatcgcattgaacaaatcttccgtatggtaatcgggattttcgcccgcgatttttgcagctgtattaacatcaaggtttttcacgccttgctctgttttaaagtgatatttaatccagacgccttcgcctttatcatttgtccatttaaatgtatggcttccgaatccgtgcatatggcgaagagtcgccggaatgccccggtctgacatcagaatggttacctggtgcagggattccggcgacagagaccagaaatcccaaacggccgttggatttttcagatgtgttctcggatctcttttttgtgtatggataaagtcagggaacttgatggcatcgcggatgaagaacacgggtgtattgtttccgacgatgtcgtagtttccttcttctgtataaaacttaacggcaaatccgcgcgggtcgcgcactgtgtcactagagcccagttcgcccgcaacggttgagaaacggatgaagagcggcgtgcgtttaccgacttctgacagaaatgcggctttcgtatattttgtaacgtcatttgtgacttcaaaataaccgtgtgcgcccgcgccttttgcgtgaacgacacgctcgggaacgcgttctctgttaaagtgcgccaatttctcaagcagatggacgtcttgtattaaagcaggaccgcgatcgccggccgtcattgagttttggttatctccgacaggagcgccccagctggttgtcaatttatttgaactcatgtgatcacctctttagatttataaaaacataatatcacctatcattaaaaagtcaatattattttataatgattataaaataattatttttattatcgaaaaagggtttgggtttgaaagactacttgactggcgggaataatgggtttaagatgaggaaaaatagaaaccgctgacttggacacaagaggctcttattcttcactggataagggcctttttttattgtcaggcggtaagggaggcggcgattgtatgcttttccggcagcattttaaacctgtcgatattcacggtcatctgccgtacagcctttatttcggcaaaaacgataagacattttccgattataaccgggagcggtcagatagaatgaatctgacttgggattttcctgatccgcatgatgttgagggcgatgacggcgaaatcgctttgatgacaagatgggagaatgaattagataagtacggcattgacgtgctgaattttttaacagcagagagcaatgaccggatggcggcgtttattcaagccaatcctgcgagatttaccggatttgcatatcatcctttggagcgggaggatgcgtatgaagagctgaaaagagcggtagaagagctcggtctgaaaggatataaactgttcgggccgctgacagacattgattttcatgatccgtcgctgaaaaagctgtggacgtatctggctgacaaaaggctgcctgtattaattcacttcgggcttttaggaagagcggggggcattgtcagccatcgcaacatcaacccgctctccatctaccgcgtcgcgagagagtatgctgatattccgttcatcattccgcatttcggcgccggatattatcaggaactgctgcagctgtgctggagctgcccgaatgtgtatattgacacgtccggctcaaatcagtggatgaggtggatgccgtacccgcttgatttggaaattctgtttcgaaagacatctgaattaatcggtgctgaacggatcatcttcgggacggattcgaacggatttccgagaggatatgtatacagatatcttcaggagcaggtgaggacctgccgggaaatcaatatgcgggaagaagatatagaaaacattttcggcaacaacgcgcggacattattgaaaatcgcccgtcaagaaaaggaagtaaatacgtgatacagccgatgcgctctctggcagggttatgccggagggcgtattttaatccttataaaaaacagttgacaagtcggaataatttgaattaacatgatattcaaatttaaaaacaaacgggttgccgatcggaccgccgaaggctcccatctctgcaagcaatcggagatgggggcctttttgtttttcgatcgcgcgcggcaggaggagaggggaagacagatggctgtaaccatcagcatacaagaaaaagcttttgagtatgaaggccggaaaacgccggtgctgaatgatattgagctttcaattgcatcgggagaatttttgactgtcatcggtccgagcggatgcggcaaaagcacgcttttaaaattgattgccggtcttgataccgattataaaggctctgtcacaataaacggccgcaatgtgtcgggaccgggcatccggcagggatttatctttcaggagcaccggctgtttccctggctgacggtaaaacaaaacatcgctgccgatctcaatatgaacgacccggccgttcggaaaaaagtggatgatctgattgaggttgtcaggctgcagggagcggagaacgcttatccgcgcgaattatccggcggcatgtcgcagcgggtcgccatcgccagagcccttttgcgcgagccggaggtgctgcttttagatgaaccgttcggggcgcttgacgcttttacgagaaaacatttgcaggatgtgctgcttgatatatggcgcgagaaaaaaacgacgatgattctggtcacgcatgatattgatgaatccgtctatttaggcgataagctggcgatcctcagggcaaagcccggccggctgcacagcctgatgccgattcagcttccgcatccgcgcaatcggatgtcagcggattttcaggccgtccggcagaaggtgctttctgaatttgagaaaacggaagacctccggtttgcggatgggtccggaatatagaagggacgaagcgaagtgaaaaaaatcatcattcttttagccgcagcagtcatgatgtcagccggatgcagtgcagacaggacaggagggagcgggaaaacggtgaaagaaatccggatcggcatccagcagagtttaagcccgcttctcattgccaaggaaaaaggctggtttgaagaggccttcaaaaaagacggaataaaagtaaaatgggtcgaattccaaagcggtcctccgcagtttgaaggtcttgccgccgataagcttgatttttcccaggtcggcaattcaccggtcatttccggtcaggcggcagggattgattttaaagagatcgggctgtctcaggacgggttaaaggcaaacggcattctcgtaaacaagggcagcgggattcagagcctgaaagaattgaaaggtaaaaaaatcgctgtagccaaaggcagcagcggctttgattttctctataaagctttagataaagccgggctttccgccgatgacgtcaccatcatccagcttcagcctgatgaggcggtttccgcttttgaaaacaaatcagttgacgcatggtccatttgggagccgtatttgtcgattgaaacgctgcagcacggggcggaaatattggcgaacggagaaagcacagatttatattctcccggtttcacgttagtcagaacgggattttccaaagaacacccggatgaggtggtccgttttctgaaagtgttcaataaagcagttgcatggcaaaaggaacacaaagatgaagctgtctccttatatgcgaaaatcaaacatcttgatccgaaagtcgtcagaaacgtgcttaacaatactgagcctctcaatgaaccgatcaatgatgatattgtcaaagcccagcaggaaaccgctgattttcaatatcaaacaaaagcgattcataagaaaattcatgtaaaagacgttgtcgacaattcatttattaaaaaagcgcttgaaacgggggatggcaagtaatgaaagcagaagcatcaacggctgccagcgcaataagccaatcagaaaagaaagctctggcaagatcccggaagtattcataccaatggatgaaagggattgtactcccggctgcggtcatcgcagtatggcagtttatcgcaagtctgggcatcgtctcggccacggtgctcccctcacctgtcgtcatcttgcagacgtttcaggaacttcttctttcaggtgaactttggggtcatttagagatcagtttatacagggctgctgccggatttctgcttggcgcgggcctcggacttgttttcgggctgctggtcggtttctcaaagcggacggaagcatatctagatccgtctctgcaaatgctcagaacggttccgcacttggccgtgactcctctgtttattttgtggttcgggtttgatgagacatcaaaaattctgctgatcgcattaggggcatttttccccgtgtacattaatacgtttctcggaatccgcagtgtggacgcgaagctgtttgacgtcgcgcgggtgctggaatttaactggtatcagcagatgacgaaattaattcttccggcatctctgccgaatatcctgctcggcatcaggctctctctaggcattgcgtggctcggtctcgtggtggcggaactgatgggatcgagcgagggcgtcggttatatgattatggatgccagacaattttcacagacaaataaggtgtttgtcggcattatcatttttgcggctgtcggcaagctgacagatgcattggtcagaatgctcgaacggaaactattaaaatggcggaacagttatgaagggtaacctattaaaaaaggagagattcatatggagattctttggtttattccgacgcatggtgacggccggtatttagggacgcaaacgggagggagaacggcggatcatctttattttaagcaagtggcacaggcggcggacagactcgggtatacgggggttctgctgccgacggggagatcatgtgaagacccgtggctgacggctgccgctttagcgggggaaacgagtgacttgaaatttttagtggcggtccgtccgggactgatgcagccgtctgtcgctgcgagaatggcgtcgacaatggatcggctgtcagacggccgtttgctcgtaaatgtcgtagcgggcggagatccttatgaactggcgggagacggcatgtttatcagccacgatgaacgttataaggcgactgaagaatttttaaccgtctggcgcggactcatgcggggggaaacggtgacatatgaaggggaccatatcaaagtggaaaacagcaatctgctgtttccgccaaagcagtctccgcatccgccattatatttcggcggttcatcacaggcgggaattgaagctgcggcgaaacatacagatgtctatttaacatggggagagccgccggagcaggtaaaagaaaagattgaaaccgttaaaaaacaggctgccaaggaaggaaggacgatgcgttttggtatcagacttcacgtgattgtccgggagactgaggaagaggcatgggaagcggctgatcgattaatcagccacttagacgaagagacgattgcgaaagcgcaggctgcgcttcggcgcgctgattcatcgggacaaaaacggatggccgatctccataacggtgaccgctcgaagcttgagatcagcccgaatctctgggccggcatcggactggtcagaggcggagcgggcacggcgcttgtcggtgatccgcagactgtcgctgctcgaattttagagtatcaggcactcggcattgagacgtttatcttttcaggctacccgcatctggaagaagcttattatctggctgaactcgtgtttccgcttctgccgtttcagaatgaacggactaaaaagcttgagcgcagactgggtgaagcaatgggaaacgaccattttgcaagaggaaataaagcgacagtctgatgacgtcgcaaggcggataattgacggcgggcgctttctgcggattcatttcggggaaatgccggcagtgaaggcgggtattcacccgcctttttaagcgcttagcttgcacgatgctcatatggatgatatgatacaaaacgtaattattacgatttgttaggggtgctgaaatggcaaaaaaatcaaaagtgatcaaagagctcaagcggcagaagcttgttgaacaatatgcggacatccgaagagaattaaaggcaaaaggagactgggaagcgctgagcaaactgccgcgtgattctgctccggccaggcttcataaccgctgtacgttgacggggcggccccgcggatatatgagaaaatttaaactgtccagaatcgcattcagggagctggcccataaaggccggattcccggggtgaaaaaagcgagctggtaacgtaaaaaactccggatctgtcatgaaccggagtttttgccgtgcttatgaaaagtgaaaacataagccaaatgctgaatcatcatcagaatgaaaatcaaaagaatcggaaaaaagggaagatgcggctgaatcagcggataaaacaaaagcagaacggctgcggccggcaatgagaagtaaacggcgatatacgaggaacggcaagctttagccgtcatcatctgttctctttcatcctgttcctcaaattcatcgggcacaagcctgtgctttttgccgttccgttttttcttttcagtatagatatataatgcagtacaaacggtaaacagcagaaacggcgtgatattcagctcaaatgaaccgctcccctccgtttggaaaaactgagcgatccgcggcgccgcttccataaaggaaataagcgtccagcaggccaatccgtagagtgcaaggtgaaaacacgcttttcttttcaaactcattttttctcctcctccagccagaaaacttcctccatcggcagggagaaagcccggcagatgttaagcgccaataaaagtgaaggcacataatctcctttttcaatcgctgcaatcgtctgtctggtggctccggcttcttttccgagcgtttcctgagaatagccgaatctggctctcagctcttttactttatctttcatcatcaggcgtacctcaagttttttcttttttatattgtatgagactcttaacaaaatgtaaacccaacttaacatgtggacaaaaaaagaatttttttcgacaaattttttaacattcccttgacgaaaaaaaaataaacatgtaatattagaaacatcaaatcggtactgacaaaaaataattttgatgcgggtgtagtttagtggtaaaacctcagccttccaagctgatgtcgtgagttcgattctcatcacccgctccatacatacgttattaacgcagtgtttcgtttctctgataaacgaagtattgcgtttttttatgtgaaaaaagacacgaaggcgtgtctttttatgaaagccaagagacggtatgcgtgcctccgtgaatttgttcaaacatttttgttaaggatgatagcagctcatccgccgcgtcggcatgaaatgaaggcgggaaaaagatcagctgcagcattttctttgtgccgggcgtgaccgggcgggtattgatatgtccggtgaagtcgccgaaaacgccgtccgggccggagaaagacagtacgctttctttttctccgatcgtaatcgaaatcggttcatctatttctgcggcgtcatacgccatgataggcaatgaatatttcaaggagaaaaaaagtatggtatcatgggctgaattcacactttcaatgaatcgttcccgggaaatatcgccgagcataagctccatcggcgttttttgtcctgaaaaggcgggactgagctgttccattatacgcgcccactcttttacaaaaggctgctcttctataccgccgtcagcataatcaaagtaaagagattcttgaaataaacggaggcggcctttcagcatttgcggagcaggcccgacttcgatctgttcatataagacggctgccgctttgatccccggcacccgttcagcaataagtggatctaaactgatgttcaagtgtgttcactccatttcgggatgataaaactctattatacctgtgcgggagcctgatcacaaagaaaggaggctgtgcaaaaaatgaatattcataaactgaaagaggaattaatcgaatacgccaaaagcatcggagtcgacaaaatcgggtttacgacggctgatacgttcgacagtctgcgggaccggctgattcttcaggaatcactcggctatttatccggttttgaagagccggatattgaaaaacgggttactccgtctttgcttctcccgaaagccaaatcaatcgtcgccatcgcccttgcgtatccttccaaaatgaaagatgcgccgaggagcacgagggacgggcggcgcggcattttttgcagagcttcctgggggaaggattatcatgacgtgctgagggaaaagcttgatctgctggagaattttctccaaagcaaacatgaggatatccgcacaaagtcaatggtggatacaggggaattgtccgacagggccgtggctgaacgggcgggaatcggcttcagcgccaaaaactgcatgatcaccacgcctgaatacggctcttacgtctatctggctgaaatgatcaccaatctgccctttgaaccggatgtgccgattgaagatatgtgcggtacgtgcacaaaatgtttagacgcgtgtccgaccggcgcgctcgtcaatcccggacagcttaacgcccagcgctgtatttcgttcctgacccagacaaagggatttttgccggatgagttccgcacgaaaatcggaaaccgtctgtatggctgtgacacgtgccagacggtctgtccgattaataaggggaaagattttcatcttcatccgcagatggagcctgatccggaaatcgcaaagccgctgttaaagccgcttttgaccataagcaaccgcgaattcaaagaaaaattcggacatgtatcgggatcatggcgcggcaagaagccgatacagcggaatgcgattttagctttggctcattttaaagatgcctcgtctcttccggaattaacggccttgatgcaccaagatccacgccccgttatcagggggacggccgcctgggccatcgggaaaatcggtgatcctgattatgcgggggaattagaaaaagcgcttcaaatggagcaggatgaggaagctatacgggaaattgaaaagggactggagctgttatcggtttctgataagactaaaaccggccggtcctgacatatgtatagagaaaaagcacttggcgtgagttcaagtgtttttctttataaaacagtatggtgggtggagcgcttgaagcatattattgaagatttagcggaggcccggcttcattatttaatcaacggaaccgagatgaggcacaatgggcagcacggcgatcttgaggtcctgacgagaaaaaaagagctgtttgaaaagcggaaagttgacatcgtgaaagcgaaggcaaaagccgtcattgtcaaaagcagccttgaggacgacggcacgttatgcgtcatgtacacgattcatttcgaatatttgtgcaaggagcatgacggacacctttacttagaagagcagattgaggaacggactgcatttctctatgatcggcttttgattaaagaccgggaagtaaagaaaaaaccggcgggattttctgacggaaacagtgtaattgaatatgagcggagtgaacgggaagatttcgggcgggcgtttcaatatgaccgtctggctgccgtgcagtatgcggagaagttttggaataaacgaaatcccgcttataaaaatttcagcgacaactgcaccaattttatttcccaatgtttacatgccggaaaagcaccgatgcgggggcatccgaacagaggctcaggctggtggatgaaggcaagctcgtggagctacagctggacggtcgcgcattcgatgaagatgtatctggcccaatccaaggcagggcttcgcgcggtgcaagtatcaagagctgaagaactgatgcccggagatattatttgctatgattttgaaggggacggccgttttaatcatacggcgatcgtggtcgcgaaagataaaagcaatatgccgcttgtcaatgcccaaacgtatgacagcagaatgagatattggtcatatgaggattcaacggcgtatactccttccatcagatatgcgttttttcatattacggatgatacgacaaaagagtaattaatgatataatggtgggcggaataaaaaacagaggtgaacatcgtggcattacatgtcgttttatatcaacccgaaatcccggccaatacgggaaatatcgcacgtacttgtgcggcaacagacacaacgcttcatttgatccgcccgctcggattctcgaccgatgataaaatgctgaagcgcgccggactcgattattgggagttcgtcaacgtcgtatatcatgattcattggaagagttatttgaggcatatgagaacggaaagtttttcttcattacaaaattcggccaaaagccgcacacatcatttgattactcaaatacggaggaagactttttcttcgtattcggcagagaaacgagcggacttccgaaagaattgatcgaaaacaatatggaccgctgcctgcgtctgccgatgaccgagcatgtgagatcattaaacctgtccaacacggccgcgattcttgtatatgaagcgctgcgccagcaaaattacagagatttgacgtgaaaaaaacgcccgcatccgggcgttttttttattgaataaaaaagacggacagcagcggttcacggcgtttttatatttatgggcttaacaacgtaacagtgttatgttacaatactttcatcgaaggagctggattcatggaggaacaactgatttctaaaaaagaattgctggaagaaacatcaatttcatatgggcagctgtaccgctggaaacggaaaaatttaattcctgaagaatggtttatccgaaaatcgacgtttacaggccaggaaacattttttccgagagcggaaatattaaaacgcatctcaaaaatacagaaaatgaaagaaaatctgtctctggatgaaatgagagaaatgctgtctccgcaaatgactgatgtcaacataacgtctgcggaactgcttcaaaagggactgatttcaaaagccgcgctgcaagtttatggcgaagacggcgtgacattcacgtcccgcgcgctgctgtctttatatgtgcttgaagggcttttgcaatcgggtaatatcagccttgaggaaggaaaattggcggcaggggtgctgaaaacgtatgaggcttccgagctgaaagcgaatacggagcttgtcatgctccgaaagcttggcgtaacgacgtgcttcatcgcagacgcggaacatattctatttgaaccgactgtcaaagtggttgaacgggtggcgcttgctgcggcatcggaagaattaaaaacgaaatggatgcaggaggaccatcaatggaagtaacagataaattaatcatcaacggttcaggaagttcaaaaggaggccgttttcatacagtggagatcaacggaagcggcacggtgtcaggtgatgtggagtgcgcgagctttttgtttaacggcagcggaaaaacagacggacatgtcaagacgcaaacgctgacgatcagcggttcggggaaaatttccggcagtgccgaagctgaatccatccgtatcaatggaacgggtgtcattaaaggtgatgtcaaaacggagcggctgaacgtcgcgggattttcatctttcggcggcggtgtgaaagctgatgatattttcatatccgggaaagccgcgattgaaggcgattgcgagacagagacgttccgttcggaaggcaaatgcaagatcggcggcctgctgaatgccgatgaagtcagtattcagctgacggcgggagaaagccatgtgaaagagatcggctgccgccatttgaaagtgatgagcagaaagagcgtgcttacgcgttttaagctgatgcctgccccggtgctgacagcggagctgattgaaggtgacatcattgaattggcggacacgaacgcgaagacagtccgcggaaatcatgtgcggatcggcgcaggctgcaccattgggactgtggaatacagcggcgattttacatgtgatccttccgctttggttaacaaagtcgtgaaacgataggaggaactgcgatggaaacgacaaaaaaattgagtcatttaaaaatgtacggagccggacacgcctccggcggctcctaccaaaatgtaagcattaaaggggaaggaactgtcggcgaaggactgcaaagcgaacgctgccggatattcggtacgggactttttctaggagatgccgagatcaacaggctgaaaattttcggagagcatgaagttgcaggagatttatcagcacgttcagcaaatgtgatgggcacattgaaagtcggcggctccatgcgtttcgccacgatgaggctgaaaggacttgctgaaattggcggcggggccgcgggagagcagtgtcatataaaaggcagtctcaccgtcggcggcgattgcgagacggagctgcttcatgtaacaggatgtatcaatgtggcaggattgttaaacgcgggggacgtaaacatccatttgcgttatgaccgaagccgcgtgaaagaaatcggcggcacatcgatcaccgtcagacggaaactcggttttcttaaacggaaagccggcacgctttctgctgaattgatcgaaggagacgcaatttatctcgaatacacggaagcggacatcgtcagagggaaacatgtggaaatcggcccgggctgcaaaatcggaaaaatcgagtatcaaacaagctgcaaatctcatgaaaaatcaactgtccaagaacatattcaaatatgaaacagtgttatgttgtacaggaaagggtgctcttcataaagagcacccttttgccgttatttgttttcaggtttgctgtcgtaacccgccgtaaaaatggatactaaaaaagtgagaatgaccccaagtaaaatgatcgttttcatcatttctcctcctctttgcttttccatttgatgtccgagtctggatgaaactgtatttctttcattatgaacggtgcaccggacccttgtcaatgacggccttgtaacgtctttatttttaagaaacgaaaagcatgtattatcacgtcaccgcatagattgtaacaaagtaccttatttctagtgcattaaccatgatagaggaggttcttatggatatattaaagaaaattgaaaagtacagagaggaagagcagcgtctcaaatgggaagggacgttcgctgattatttggagatcataaaagaaaatccattggtcgcgcagtctgctcattctcgtgtttttaatatgataaaagacagcggaatcgaggaggatgacggtaaaaagacatacagctttttctcgcgggagctgttcggccttgaggaatctctggaacggctcgtggaggaatactttcacccggctgccaagcggctcgatgtaagaaaacggattttactattgatgggacccgtcagcggcggaaagtcaactcttgtcaccatgctgaaaaaagggcttgaagcctactcattgacagacaacggcgctgtttacgccattaaaggctgcccgatgcatgaagatcctctccatctcattccccatcatctgcgcgacgacttctacagagaatacggcatcagaattgagggcagcctttctccgcttaatgtcatgcggcttgaagaagaatacggcggcagaattgaggatgtaaaggttgaacgtatattcttctcggaggataaacgtaccggaatcggaaccttcagcccgtctgacccgaaatcacaggatatcgccgacttgacggggagtattgatttttcaacgattgccgaatacggctcagaatcagatccgcgcgcttatcggtttgacggtgaattaaataaagcgaaccgcggaatgatggagtttcaggaaatgctgaaatgcgatgaaaaatttctgtggcaccttctgtcactcacgcaggaagggaatttcaaagccggacggtttgcgctcatctcagccgacgaattggttgttgcgcatacgaacgaaacggagtaccgctcgtttattgccaataagaaaaatgaagcccttcactccaggatcatcgtgatgcctgttccttataatttaaaggtgtcagaggaagaacggatttatgaaaaaatgatttctgaaagtgatgtttctgacgtacacatcgccccccatacattaaaagtggccgcgatgttttctattttgaccaggctgaaggaaccgaaccgctctgatattgatctcgtcaaaaaaatgaggctctatgacggagaaagcgttgaaggttacaattccgttgatcttgaggatatgaagaaggaattccatgatgaaggaatgagcggaattgacccgcgctatgtcatcaaccgcatttcctcaacaattatcagaaaaaatatggaatcgatcaattcgcttgacgtgctgcgttccttgaaagaaggactcgaccagcatccgtccatctccgccgaggacaaagagcggtatatgaattttatttccgccgccaggaaagagtacgatgacatcgctaaaaaagaagtgcagaaggcgttcgtctattcatatgaagaatccgcgaaaactctcatggacaattatttagataatgtggaagcgtactgcaataaaaataagctccgcgatccgctgacgggtgaagaaatgaatcctgacgaaaaactgatgagatccattgaagagcagatcggcatttcagaaaacgcgaaaaaagcgttccgcgaagaaattttaatccgcatatccgcctatgcaagaaaaggaaaacgctttgactataattcgcacgaaagactccgcgaggcgattcagaaaaagctgttcgcagacttaaaagatgtggtgaaaattacgacctccaccaaaacgccggatgagcagcagcttaaaaaggtcaatgaggtagtggcaaggttaatagatgaacacggctataattcgactagcgctaatgaactgctgaagtatgtcggaagcttgttaaaccgctgatgtttgatttcattgagaggcccgtctgtaaaaggacgggttcttttgtctgtttttcacaattgtttgtcaattggagagtccggccggcataagataaaaataaatcttttcgccggacttgtttcataaacaggaccaagccggaatacacatgtaaaacgaccataacggttaaggaggggaattcatgtcccgtaatgacagcggaaattttttgatttcagaggaagactggtccctccatcgcaaaggctttgacgaccagcagcgccaccaaaagaaagtacaggaagcgataaaaaacaaccttccggaccttgttactgaggaaagcattattatgtccaacggaaaagatgtcgtgaaaatcccgattcgttcgcttgatgaatataaaatccgttataactatgataaaaataaacatgtcggccaaggcgacggcgacagcgaagtcggcgatgtcgtcgcaagagacggcgcagataaaaagcagggggccggaaaaggccagggagcaggcgatcaggcaggcgaggattattatgaagcggaagtttcattgatggatctggaagaagcgctgtttcaggaattagaactgccgaatctgcagcaaaaggaaagggacaatatcgtccataccgatatcgagttcaatgatatccggaaaaccgggctgacagggaatatcgataagaaaaggacgatgctgtcggcctataaacgaaacgccatgacaggcaagccatcgttttaccctatttatccggaagatctgaaatacaaaacatggaatgatgtgacgaagccggaatcgaaagctgtcgttttagcgatgatggatacaagcggttcgatgggcgtatgggaaaagtatatggcgaggagcttctttttttggatgacacgatttttacggacaaagtatgaaacggttgatatcgaatttatcgcccaccatacggaagcgaaggttgtgtcggaagaagattttttctcgaaaggcgagagcgggggcaccatctgttcctccgtttaccggaagtctcttgaattaattgatgaaaaatatgaccccgcccgctacaatatctatccctttcatttttcagacggagataacctgacttcggataacgcccggtgcgtaaagctcgtcaatgacatcatgaaaaaatcgaacctgttctgttacggtgaggtcaatcaatataacaggcattccaccctcatgtccgcctataaaaatgtcaaagatgataaatttaaatactacatcctgaaacagaaatcagacgtatttcaagcgctgaaaagcttttttaaaaatgaggaatccggtgtaagcaaagcatcgtatgaaatataaagccgagtgaagaatcgtgcggccgcggttcttcacccggcttttttaaattaaaaataaagagaaaaaacggcataaaaaaaatccttaaaaaatgaaacttttctctttacaaaccttctttcatttattaatattttatcttgtgaactattattaagggaatgaggtgaaaatacggtgattgaatcagagctcgctttgctcagttttgaacaactgtttgatacttccagatcgatttacaaaaagcagaaaatgattctggagacagttcttgaaccttttgatattacagtgctgcagtatctgctgatgttcaaaatacataagagcaaaagcacgcagctttcaaggctggctttgtcgcttgatctgaaaccggcgtctgtcacgagaatgaccgatattctgtataagcgccgcctaatggttcggagcgactatcacgacgaccggcgtgttgttatgattcagttaaccgaagagggggaagaacttctaaagaaagctgctgttcaatatgccgaaaaagcggcggtcttataccggcagctcaataccgctgaactgcagtacctgcgcaagcttgcggaaagtttaacgaagcttgcaaacggctgtgcagtgaaaaacggaaaataaaaaaatccccacatatttttatcatcattccacaaaatgatagaggaagaaacgaaaggagaaaacaaaatgaacagaggacgtttaattctgaccaacattatcggtttgattgttgttcttgcaattataggcggaggtgcttactactattatcaaagcacacactatgtaaaaaccgatgaagcaaaagttgccggcgacatggctgctatcacagctcctgctgcgggtaaagtaactgactggaaccttgatgaggggaaagaagtaagcaaaaacgacgttgttgcaaaaatcaaaggacagcaaaatgctgacgtaaaagccatcatggatggaacaatcgtgaaaaacgaagtgaaaaacggccaaatggtgcaagccggtacgacaattgcccaggaaattgacatgaaacacctttacatcactgcaaacattaaagaaacagacattagagacattgaagtaggaaacaaagtagacgtaattgttgacggcgaccctaatacaacatttgacggaacagtagaagaaatcggttatgcgacaaattcaacatttgatatgctgccttcttcaaactcaagcggcaactacacaaaagtaacgcaaaaagttcctgttaaaatttcactcagcaacccatctgacaaggtgcttcctggtatgaacgcatctgtaaaaatctctgaataatacagatcagtcatcaaaccatgaagggaggttgtcttaggtggctaaatcagataatcaagtaaaaagtcctaaaacattgcttattgtgcttatggccgggttattcctggcgatcttgaaccaaacgcttcttaacgtggcgatgccgcacttaatgaccgagttcggtgtgagtgcgacgacgattcagtggcttacgaccggatacatgctggtcaacggtgttttgattccgttatctgcgttcttaattacccggttcggacagagaagcctctttctcgtagccatgttctgttttacagcgggaacgttagtctgcggaatcgcgcctaacttctcaacaatgctgatcggccggttaattcaggcggtcggcggcggtatcctgcagccgctggtcatgacaaccattctgcttatcttcccgcctgaaagcagggggaaaggaatggggattttcggtcttgcgatgatgtttgctccggcggtcggaccgactctttccggctggatcatcgagcattacacatggcgcattatgttctacggccttgttccgatcggggcaatcgttattatcatagcgttcttcctctttaagaacttggtggaaccgcaaaaaatcaaactcgacagcttgggtgcgattctatccattgtcggatttgcctcattgctttacggagtcagtgaagcgggcagcgacggctggggagatccgatcgtgctgtctaccgtcattgtcggtgtcatcgcgattgccgcgtttgtcattcagcaattgcgctctgaaaaaccgatgctcgacttccgggtatttaaatatgatattttctcactttccagtgtgattaacatcattattaccgttgcgctttacacaggaatgttcctgcttccgatttacctgcagaacttagtcggctttacggcgctgcaatcgggcctcttgctattgccgggcgcgattgtcatgctgatcatgtcgccgatttccggtattctgtttgacaaaatcggtccgagaccgcttgcgattatcgggctggtcatcacggtcgcaacgacattccagtacacaaaattgacaattgacacaccttacacgcacattatgcttgtctatgccatccgcgcattcggtatgtcactgttaatgatgcctgttatgacagccggaatgaaccagcttccggcacggttgaacagccacggcacggcgatgagcaacacgctccgccagatcagcggttcaatcggaacaagtttgatcacaacgatttatacgaaccgtacgacaatgcactattcgcagattgcggataaaacgagcacggctgatccaagcttcatgcagtcgttccaaagcgcggtttcgaatttaatggtcaacatgaacatgtcgcttgatgcggcgaaacaaaccgtttattcttatctctacaaaacagcttcacttaattccaacgttatggggattaatgacgcgtttatgtgggcgacgatctttgcggttatcggcgtagtcctgagcctgttcttgcgtgacgtacggaaagacaaacagcgggcgaagaaaaaagaggagctgtcattgcttccggcccctaaagaagtgaaggaatcttaatcatctgaatgggaggtttcctgaatgaaaatttacgtagtgtacgatagtgaaggcgaacatacaaaacaccttgctgaagccattgccgaaggagcgcgagaaaacgctgaggctgaagtcctgatcgatcatgtcgatcaagcagacatccgcaagctgaaagacatggatgccattatctggggatgtccgggtcactttggcaccatcagttcaggcttaaaagcgtggatcgacagactcggctatctgtgggctgaaggcgagctgattgataaagtcggcgccgtattctgtacgacggcgacaacacatggcggattagaaatgacaatgcacaatctgatcactcctatgtttcaccaaggcatgattgttgtcggacttcccggcaacgttcctgaaaacgcgctgtacggctcttactacggtgcgggcgtcacatgcccggttgacagcgatgtgctgatgacggaagaaggccttcaattaggccgtgcgcttggcagacgtgtcagccaagtcacaggtaatctaactgccggacgacagtaaggagagggttatatggccattattatagcggttattgctgctgtcattgtgattgcacttcttatcacattcaatgtccgcagcacttctgcaggacaggatgtcaaagaagaaaagagagaagcgatcggcactacagccgaacagccggaaaagcatgatccggccgaggagcgctcagccgagcatgctcccgtcgttgtaaaatctgaatctccccgtgagaaaaagaatacaatgggcgatgatgtgtaccgtcaggcgcttcagaagtttaagacttctgagacggatcaggaaccaaacgatcctgatagcggcggcaaaatgcaggatagcagctatcgtgatgcgctgctctccttaaaaaacaaaaagaagtaattggaaaggcaaatctgcgtaagagcggatttgtctttttttttattgaagatattgtaatacgtgatgatctagtgtactatgttactcatacacttgatccgaatggagagagaaagaatgacatcgtttttaggtttgctgaaaaaagatgcgaaagtttcatggatttggctcgcggtgtggctttgcggcatgatttgctgggcgtttgcagcccacgtcatcgctgcccgtcagaaagaaccgctcgtcattttcggcttttttacggcaatggggttttttcaatttcttgtagcgccgctttttatgtactatcaccttcataaagaaggaaaaaatcagctgtggctttacaatccgaatggaggattttatctgctggcttccaagctgacggcctcactgctgtatcagttgatcgggcagctggcgctgaccggttacggcatttggatgtaccggatgctttctgcaaaaggagcgctggaacacaccattcccctggccggcacattaaccggactgaatgcttacctgctgatcagttcagcgtatttatctgtgatcgtggccgtattttggactgtttttcactcattaaaacatgttcccgtcctccggtgggtgatctgcatcgtgcttgcgtttgtctggacctatattgacgataaaatcattacgccattcacttcatctcaacatgatttatggccggtaaaagtgtatgcggattttgattttcactatacaaaattgaccggctggacggtggagctgaaggccgtccacatctcgcttttcagcttcctggcagtgatcgtgcttgcggcgctctgtctcgcgctggcctctatgctgctgaatcgaaaggttgaggtgtaatgatggagaatgaatttcagtcatccaagccgatttatctgcagattgccgatcgtgtatattaccggctgatccgaagtgagctttcaccgggggacaaactgccgtccgtaagggagatggccgtacagatgaaagtgaatccgaatacgatacaaagaacgtacagtgaaatggaaaggctggggatcgtggagacgagaagaggacagggaacctttatagcggaaaggtccgatctgaaagcggagctgaaagacaggctgactaaagacgttttcaaacgctttattcaggaaatggcggagctggggttatctcctgaggaaatgatcgacgggatcaaacaatatgcggaggaagcaaacgatgaatcttgattttgaacgcgtaacaaaaaaatacggccgcaggctcgcggtcagcgatgtatcattttcattgtctccgggtaaaatctatggaattttagggccgaacggaagcggtaaatcaacaacgcttaaaatgcttgccgggcttgcgttcccgacctcgggcgccgtccggatcggagactgcgcagtaagcaggaacatgctgtttcgtacggcttatttaaccgaacatgatatgtttttcgcccggacgaccgtcggtgatatgctcacattttatcattcgcaattcccggattttcagctggaaaaagcacataacctattaacggaaatgaatctttcagcggggcagaagataaaagagctgtccaaaggcagccggggcaggctgaaaatcgttttggccctgtcgagaaaagcatccgtcattctgctggatgagccgttttcaggtcttgatccggcggtcagggagtcgattgtcaacagtctcgtatcttatattgattttgacagccagatcgtcgtcatcgccacgcatgagatcggcgagattgagacgctgttagacgaagtgatggttttcataaaagggaaaatcgctgaacggcgcgaggtcgaagaaattcgggaacaggaaggaatgtccgtgctgcaatggtacagaagcgtcatgcaggcgcacgaaatagaagggggattctaattggaaacggtattagaactgcaacaggtaaagaaaacgataaaaggacgaacgattattcatgatctgagcttctccgtccgggcgggcgaagtgtttgggtttctagggccgaacggagcggggaaaaccactacgatcagaatgatggtcggattaatgaaactgtctcagggagacatcgtaatctgcggggaatccattacgaaaaactatgcaaaagcggtcaggcacgtcggagccatcgtggaaaacccggagctgtacaaattcctgagcggttataaaaatttacagcagtacgcaaggatggtaaaaggcgttacgaaagaaaaaatagatgaggtcatcgagctcgtcgggttgcaggacagaatacatgacaaagtaaaaacctactctctcggaatgagacagcgtctcggcctcgcccaaagcctgctgcataatcctaaggtgctgattctggatgaaccgacaaacggccttgatcccgcgggcatcagggaaatcagggaccatctgaaaaagctgacacgtgaaaaaggaatggctgtcatcgtctcaagccatctgctgtcagaaatggagttaatgtgcgaccgaatcggcattctgcaaaaaggggagcttgtcgatattcaaaaagtaagggatgaaggaaaagaggataaagatacatacttcttccatattgaacaaagagaagaggctcttgccgttctgagtcagtttgactgtgtgaagaagacaaacggcattgagatcaggctgtcaaaacaggaagtacctgatgtgatatcactgctcgtccgtgaaaacatccgcttatatgaagtgaaaatcatgacaaaatctttggaagaccgtttcttggagattaccggcgggacgaaagaggaggttcaatatgtttaagctgatctataatgaatggataaaaattttcagccgcgtcggcacgtgggctatgattgtaattttaggcgtttcgatgatcggttttgcgcttctgtcaaaccatttcacctcgagcgaagccaatccgaattggaaacaggagctccaggccgaaaacaaagaaatgaaacagcagatgaaggaaaccggaaaccagacgctcattgataacctgaaacagaatgtcgcgataaatcaataccgtatggatcataacatccctgaggatacagggtacacagtgtggtcatacgtagctgattcttcgatgatgacggttttgaccgggctgtttacgattatcattgccgcaggcatcgtggcgaatgagttcaactggggcacgatcaagctgcttgccatccgtccgctcagccgttttcagattttgctatctaaatatatgacggtgctgctgttcggactgctgatgcttgtgattttatttgccggctccgctctgctgggattggtctttttcggtacagggggagatactgcagctgatgttcatctcgtatacaaagacggccatgtttttgagcaaaatatcatcgctttcctcgctaaaacatatgtctatgaatctgtctccgcttttatgcttgcgacgatggcgtttatgctgtctgcggtattccggaacagctcattagcggtcggattttctatttttctattggttatggggaacacggcgactgtatttcttgccacgaaatttgaatggaccaaatatattttattcgccaatacggatttgtcgcaatatatgaacgggactcctttagtagaggggatgacgatgacattttcggttgtgatgcttgtgatttacttcgttatttttctggcgctcgcattcggcgtcttcttaaaacgcgatattgccacctgatataaaaaagctgttttgcctttgcaaaacagcttttcgttttagatgaaaaaaaccctgccggcgtacaccggcagggtttttaaacaatttatgcttttgttacgttagcagcttgtggtccgcggtttccttcaacgatttcgaaagaaacagattggccttcttctaaagttttgaagccttcgccttgaatagcagagaagtgaacgaatacatcgtcttgaccttctacttcgatgaatccgaatcctttttcagagttgaaccattttactttaccttctaacatgaaatttcctcctaaagcgacataacgcttaaattcactattcttgctctaaaacaaacttccaagacgaaaactcttacaaaactttcttcttaaagatagttcgaacaaaaataattacctttactctaccagtaattcgaagaaaaaacaactgctaaatgtaacttttttcgaaataacatgttttaagaggagaacgctctggtacggaaatctgatttgagactagaacagcccattttcagctgataaaaaccgctttgcagcctcttaaggaagcaattgacaacccttttttaaatcggtattgtatgtaatcatgagcccgaataccatggtgcagcctctgtacataaaaatagatagggagtaggtcaacttgaacctgcggcttataaacagtctgtttcttatcattttgatcatatcacttacttcatgccattatcctgacaggaaccggacaattactatcggaatcaatgaatctgatcaatcgatctgggagtttgtcgcgaaaaaagccggtgagaaaggattgcagctttctttggtaacgttttcggattatgccgaggccgttttggcgcttgccggcggggatctcgacgccaatgcgtttcaatccgtttcttattttgaatctttgccgcctcatgtgaaaaagaagctggctcctttaggaacgacatatgcggcatcgctgggggtgtattccaagcaacataaacggctgaaggatataccggacggagcggtcattgccgtgcctggtgaagcggcggccttcggcagggcgctttttctcatgcaggaggccggactgatgacattgaaaaagggattcaccggtacgggttcaactgatatgatcaaggacaacccgaagcatctgaccttaaaaacggaaacaaaaaagaacgcctatcaggcggcggaacatgctgacgcagcagttcttagtcaaagcgaggcgaaaagagcaggatttcatgcggagaaggacgcgctgatccgatcggcgcaaatgaaggaagcgtatattcatctgatcgccgtcagagctgaggataaagatgatgaacggatgcaaaaactcctgtctttgtatcaatcagatgataccgcggcgtttattgaaaaagaatataagggcagcctgattcctgttttcctgaggggcggctttctcactgaaaagaaagaatgatttcctcttcaggcgatcattcttttttttcagtgctgcacacttgattgcgccctgatgttttcgctttgtacagcatccggtccgcgatcaggggcaatgtctgagggtccgatgtatttgtcggataatgcgcgatgccgagggaaacggtcacgggaattgtatctccgctcgtcagcagaatcgggttcgcgtcaatcgtgtgcctgatttcttctgcgaggtgaagcccttttgtatacgtgcaattgggcataagcacggcaaattcttccccgccgatgcgggctgacggatcagaactgctgagtaagaacctcaggcgcgcccccagttccttcagcacttggtccccttcataatggccgtattggtcattgatctgcttaaagtgatcaatatccaaataaataagcgcgagctgagacgagggggattgagacgcccgatcgtacagaacgcgtgagacttcctcgaattttctcttattaaaaatccccgtcagaaaatcataattcgcttgaaacttgtattgcttgaacaaaagggaggcatcggcttcgtgtttaatgatatacagcgacagcattccgcccaaggtagaaatgagccaaaaataaacgagggccccggcaggctgttcaggcataagtaacagcagcgtcagggtgataataacatttgaaaagagcagcataacgaacgcatttttgtgattcggcttttttcctctgaatacggccacagaaagtatcgcaatcatgccgactgcggcgatagaataaatggcgctggcattgaaattgatcaggatacggcctgccacgataatgataaaggcagctgctgtagacacccagcctccgtaaagagcggcgatgataatggggatatttctgagatcaatgatggaatcggagtaagaaaagccgaaagcaatcagaaaaacccctaaaagcccgcagaccgtccccttcagtaattgaaacatcggacggtcttctttatgtgaaagcgactctttaaaaagaacggtgaagagataattaaatgtgattaaaatcgtcaaattaagaaacagttccttcagcataacaatcacccttatataagttactaaagaaaggatggaaagaaaagagaaaaatcaataaaaatacatatattgtcaattcttacttgaccgatcggaattgatgtaatatagtgtttaaggataatgagcaagggagtgtttacctgttttggagaatttatttgtaatcttacatgtttttattttgtttttgtttatagcaggtctgtttgtgatgcaaaaaaaacacgtttccttttctaaacgtgtctttaccgcactcggattaggcattgtattcggttttgcgctgcaattgatttacgggccggcctcacacgtcgtgacacaaacggccgattggtttaatatcgccggcggcggttatgtcaaattgcttcagatgatcgtcatgccgctagtctttatttctattctcggcgcatttacgaagctgaaactgacccataacatcgggaaaatcagcggactgatcatcggaattttgattgctacgacagcaattgccgcggcagtcggaattgtttcggcgctttcctttgatctgaaagccgttcatatcgaccaggggagcactgagttatcaaggggtcaggagctgcagcaaaaatctgaggatatgacggccaaaacgctgcctcagcaaatcgttgagcttctgccggggaatccgtttcttgatttcacgggagccagaccgacttccactatcggagtcgttattttcgccgctttcctcggcatcgcttttctgggcgtgaaacggaagcagccggagcacgcagcgacattcagcggaattgtcgatgcggtttacgcgattattatgcgcgtcgtgacattaattttaagactgacgccttacggggtattggcgattatgaccaaaacgatcgcgacaagcgacatcgacagcattgcgaaactggggatgtttgtgatcgcttcatacgccgcgcttatcgccatgtttatcattcacttgctgctgatcacgttcagcggtttaaatccgatcacatacgtgaaaaaagcatttccggttatggtgtttgcgtttacgtcccgttcaagcgcaggggctttgccgcttaatattaaaacacaaaaaagcatgggcgtcccggaaggaattgcgaacttcgccggttcattcggcttatcgatcggtcaaaacggctgtgccggcatttacccggcgatgctcgcgatgatgattgcgccgacagtaggacaaaacccgtttgaaccgggatttatcatctccgtcatcgccatcgtggcaatcagttcattcggtgtagcaggcgtgggaggcggcgcgacatttgcggctctgctcgtcctatccgctttgaacatgcctgtcgcgcttgccgggctgctcatttcaattgagccgttaattgacatggggcgcaccgccttaaatgtcagcggcagtatgaccgcagggctgttaacaagtaaaatgacgaaggaaaccgataccgcggtgtacaatgattccacaatcgtcattgaaactgaagaagcttaataaaaaagcagatagcactaaaacgaaaaatccttcatcgttgaacgaatgaaggattttttcgtttctaatgatttccgggttcaatttcttccagcatattcatcacggtgctgtcatttaaaacattcaccgcgctttcttcgaagtgaatcggctcggtatagtgaggcttcggcgaagtttctttactgcggctgcggtctgcctgtccgtccgtatgggatgagccggagtgattgcgggaagtctgctcatgctgctgtccgccggattccccgccgaacgcctgtttgatcagctcggcaggctgcaatgagccggtttgtgaatgccgggctttgtccgtgtgctgctgtccgccggattccccgccgaaagcttgtttgatcagctcggcaggctgcaatgagccggtttgtgaatgccgggctttgtctgcgtgctgctgtccgccggattccccgccgaacgcctgttgaatcaggtcagcaggctgcatggagtgtgtgccatctttatgctgcattctgcctgaaaccattccggagattttccggcggatttcgggtgataaagctgcaatcagaatcgatgatccgatcagcagcgctgtcgggctgataccgcttttttttctgaacaagttaaatccctcctcattcaattgattacgcttacctttccctttccttctgatatttatccaaaccgctcaggatgcaaacggcgtgcataaatcccgccgaatagaaaaacctatacgtaaagtgagaaaggaggaattcacatgataaaaaagcaagcagttatctctgcccttcttctgccgatgctgattaccgcagggtgcagtatggggaaccaaggagaaggaaaacgaaatgacaaccgcacccagaatgtaaattaccgcaacacgcctaacgacggtgcgacaaatatgaatacagtgaaccgtcataaccaaaacaccgatcacaatgacaatcgtaacctgagagtggctgataaggccgccgacaaggtgactgatttaaaagaggttaaaaatgcgactgtgatcgttgccggaaacagcgcatatgttgccgttgttttgacaaacgggcaaaaaggcgccatcgccaaccatttgaaaaataagattaccgataaggtaaaatcagccgataaacatgtccggactgtatatgtatcagcgaacccggacttcgttgaacgcatgcaaggctacggaaaacgaatccaaaacggacatcctgtatccggtctgtttgatgaattcggtcaaatggtgcagcgtgtattcccaaaccccaataaataaatgaatggaaaagccgcatttgctgcggcttttttattttatctgccgtcacgacccagcgctcctgagcataaagtaaagaatgagatgaaaatgaaaggatcggggaggggagcttgtttgcgtgacggcatggggaaacgggcggcattcactctgatcctgtgcggagtccttgtcatattggctgtcagttcagccgtttcagtaagtatgatgtacgtcctgtcaggccaaaacagccgctctgttccgacgaaggaacaagtgactgaacacatgaataaagaaatttacaaacatacagcgatttactatacggcggatgaaaagccgctcttggatctgaccaagcttacgctggaccacgcaaagcgtatcaatcaaatcattgtcggctataaaggtgcagcgccgctagaactcattttcttttcggatgaagctgaaatggagcaatattcaggattgaaaaatgtagtcggtttttattcagaacaggagcagatgatggggcttttgcctgaagagaaaaaacagcttttgaaaaaagatgagctggccgttttcatgtataagcaattgattatacatgaatatacacactacgcgtttcatcaaaaaacgcggcaattggggacggatacgtctgtatttccgctttggtttcatgaggggctgagcgagtgggtcgcgcattatgatgtagtcattgatccgattgcattttccgtcgtgccgtttgatcaattaacgaccgaccgaaaatggcagaaatcgcgtatggaatatgaaacggatgtctatttgcaaagcttctatatgataaaggacttaaccgacacattcggagaaggcattatcttaaccattatcaacaaaaccgccgaaacacaggattttgaaaaaggctttgaagcggctacgaaagaaagcctgaaacgatttgaacatgatttcataaaagcatatgaaaaaaagaaaacggcgttggagagtcaggtttccaacgccgtttttattcaatggaggttttgctgctgctgtcccatttgtcctttaatcggaggcatttgcggctgtccctgggccggtgcaaatgaattcagcatggtctgcatatcttgtgcattgagctgaggaacctgataataaccgtgtttgttttggtataagaagatttcatacgccatttcgacatattgctgaatttgggcggagagcactcttctagtgacgggattggtcatttcaagcgagctcatcgtcaagagagaagcttgagctttaatcaggccgagcatatggccgctgatcccgagatctttgacatcatttaatgattgattcggttttttcggctgagtcggttttataccgtagacggcctggttctgttccttcatcatatatgtcgacgtttcctgagaaggcttttggccggtcttaaagcattctgccgtcagattatagagtccgagaatgaattgatactggcggtcaaggatgtcggccagctgctgatcctgtataaactgtctgagcatcataaattgatccaaaacgccgactgttccggccagcacttcatgcatatcgaaaagctcatgtcctccgtgattcacttgcggtgaacccgggatcccttgatttactggcggctgctgctgattctgctgctgttccactggttgttttcctccttcatgtcaaatcatcattaagatgtgaaaaaagccgatccgttatacatcaagtcctgtttcgttacgtggggattatttactattttgcgccagcgaagacaatctttacaaaaaagtgatgtgatttttaagaaaataagctaacgtatttcttagaagacaggggggaaatgaatgaagaaaaaaaggggtatgcgtctttcgtgctgtttgctgacggtttgttttttgatgttcagtgtgaaagatgcggaagcaatcggacaagccggctcactgaatgaagctaaaacagataaggcctataaagaacagcagactgaagactccggccgtgtcccgctcagaatcatcagtatgaatgatctgcacggaaaaattgatcagcaatatgagcttgaccttaacggagacggtaaaccggatggcacgttcgggcggatggactacgccgcagcgtacattaaaaaggcgaaagccgagaaagaacacgcctttgtcgtgcatgcgggcgatatgatcgggggcagctctcccgtgtcagccctttttcaggatgaaccgacagtagaattgatggaagacatcggttttgatgtcggaactgtcggcaatcacgaattcgatgaaggaacgaatgagcttaaacggatcatcaatggaggagatcatccggacggtaaggggacaagcggttatgacggacaaaatttcccgctcgtctgcgccaactgtaaactgaagtcaggggagtcctttctgccgccgtatgaaattaaatacgtttccggaattccggtcgcatttatcggggttgtaaccagatcggcggcaggcatggtcatcccggacggaattaaaaatattacgtttacagatgaggtaaaggccgtcaatgacgccgccgctgacctgaagaaaaaaggaattaaagcaatagccgtgctcgcccatatgtctgctgaacaaaatggctcagctatcacgggagaatccgcaaagcttgcaagcggaacagactcagagattgatgtgattttcgccgcgcacaatcataaagtcgtaaacggagaaatcaacggcaagctgatcgtgcaggcatttgaatacggaaaagcaatcggaatcgccgatcttgaacttgataaagagtcgaaggatatcgtgaaaaaatcagcggaaatccaatatatcgatcaaagcaaaatcaagcctgacccggctgcggcaggcatattaagcaaatatgaagagaaagtgaaaccgattatcagcgaagcagtcggggaagcggcccatgatataacgggcgggtattcaaatgacggcgacacggcgctcggaaatctgattgccgacggtatgaaagcgaagatgaaatccgattttgcgcttatgaatggaggaggcatccgggacggcataaaaaaagggacgattacatggggagacctttataatgtacagccgttcggcaatgtgctgacgaagcttgaaatcaaaggaaaagatttgcgggagatcattaacgcgcaaatttctccggtgtacggtccggattacagcatcagcggattttcctatacatggaacccggaaaccggacaagcggttgatatgaagatggcggacgggacagacatacagcccgaaaaaggatatacagtaacagtcaatcaatttatggcaacggcagcgggggcaaaatacggtccgatcgggaaactcggcaagaatccggtgacggggcctgaggatttggaagcgacagtagactatgtcaaaagcttttccgcgccgatttcttatcaaaccgacggccgaatccgcacggcatcagccgccgaaacacctgatgacactggcaatcagccgggaagcggggaaacaccgggcggtaccaggcctgataaaggagaaaaacctcaagcggaaaaacccgctaaaaaaccggatgcagcagaacagcctgatcaaaccaaaaaacctgaacgtcctgtcgtagaagaaacagcatctgatacagtgcagtcaattcccgaatcccgtccggcgtctgccgcaaattcggaacaaagcacaaaacagactgaaagcggcacacaaaaaggccgcccattgcctgatacttcagcgggcagccatcagacggcattggccggcctggtgatcacgggtgccggcgtatattggcttttcagaaagaaaaggggaacccgcacacgatgaacaaactgaaacatattccgcttctcgtcatcatcgccggtatcatcatcacatgttacggaagctggaagatcattgattcacatatgaaaacgaaccaatcgcttgaagaagcaaaaaaagcaacagaacctgtattggaaaagaacgaaacaaaaagcgctgtgctgacacagcgcaaaaaagaatttcaccccgaaacgggtgaggcaagcggcattttagaaatccctgaaatcgacgctgagctcccgatcgtcgaagggactgacgcagatgatttagcaaaaggcgtcggacattataaggacagctattatccgggcgatcacggccaaattgtgttatccggccacagggacacggtgttccgccggaccggcgaactgaaaaaaggagacagactgaacgtgattttgtcttacggcacgttttcttataaaatcagccgtacaaaaatcgtcagccgggatgatacatctgtcatcacccttcagcacaagcgggaggaactgatcctgaccacttgctatccgttttcttacattggaaatgcgccgaaacgatatattatatatgccgacccggtttaagaaaaatacgtttcggtaaaatgagccagatcagccggcatcggcgcctcggcaacgatttcttctcctgagatcggatggacgacactgactttttttgcgtgaagcgcctgcctgtgaaacagcgtcctgcttcctccgtacaggtcatcgcccgccaacggatggccgatgcttgccatatgaaccctgatttgatgtgttctcccggtttccagttcaagctctgccaatgtaagctgcgcaccgggatgatagcctttcactttgtaatgggtgacggcggcttgtccgccgggtgagacgcgccgtctgacggaatgtgacctgtcgcgtccgatcggcgagtcaaccgtgccttttttcggcgtgacttttccttccgccgcggcgatataggtgcgttttaatgttttggtttcgagctgacggtcaaggattgcatgggccaggcggtgtttcgcgaaaacgaccgcgcctgacgtgtcacggtcaagacggtgaacgtggcgcactttcgcctgctcgccgttgatttgaaaatggtaagcgatcaggttgctgagggtgccggtctgaccctcttcatttggatgagtcggcattcccgccggcttatttgcaatcagcatatgattgtcctcaaataaaatgtccggctctccgtattccggagtcaccgaagaacctgttttttcctgaagatcaatgaataagcgatctccggttttcagtatgatgttgtttttcggggatgttcgattcacctgaatgctttcttggttcatccattccgtaattacgggttttgacgcctggaattcagatttcaggactgaaaacagccattgtccggcgtgcttttccgtaatcaggaattccagaccgcggtcattttgtttcatatcataaagctccttttcaagcggaaagcggctgtttcaataggaaacacttaccttagctttcgcgtttttttctatgctattcttgataaagattaaggatattcacatggcaagaaaggtgattgatgtgagaattgtgaacgcagcgactgacggacaagaaagcgcgatacaagagctttcctctgaattgtttcaaaatgtctttcctctttatttctccgaactggaaattcagcgctttaaaaaaaggggcgtattatcattacaaaaccaacgttaccaaggaactttaaaagaagcgtttcaaattatggcttgtctgcaaacggtacatatcatgctgtcaaagccgcacccggtatatgacgtcaaagagcgggcgctgtttgataaaaattgcgctttgctgaatgaatgcggaatgaattttccctttacctatgatgatttcgagacaggggccggatcagaagcctgcggtcgcagaaggctgatctgacgggtataaagagccttttgacaggctcttttttgcttccttgacatgataccacaatttctttcctctaactccctttataatgagacaaatccccgagcataataaatgtcgaaaggggtgctttacaatgagttcaatcaaacaatcaatgactacccacgtggctaccgtttctcccaatcaaacgattcaggaagcggctgcgctgatgcaccagcataatgtcggagcaattcccgtcgttgacggaggggaattaaaaggaatgctgacagaccgtgatatcgcattgagaacaacggctcaaggccgcgacggccaaacacctgtttcacacgtgatgtcttctgcagttgtatccggaaacccggaaatgagtcttgaagaggcgtcacatctgatggcccaacaccaaatccgccgccttcccattgtcgatcaaaatcatctggtcgggatcgttgcgcttggagacttagcggtcgatcagcgttcaaatgagtctgcgggagcagctctttccaatatttccagtcaaaacacacagtaacggatgaagagagcttgcactcatgcaggctcttctttccgtgagaatgttacattttgaacgcgaaagaaattcacggtatagtgtatacataggtcagtacgtttagctaaaggagctgtaaccattgataaaagcattaatctttgattttgacgggttaattttagatacagaaacccatgaatatgaagtgctgcaggaaatgtttgaggaacacggttcaacattgcctttatccgtctggggaaaggtgatcggaacggccgcggggtttaagccgttcgcatatttagaggagcagctgggaagaaagctcgatcatgatgaactgacggcgatcaggcgcgggcgcttcgaacagcggatgaagacggaaacggcgcgccccggggtggaagcttatttagccgcggcaaaagaattaggattgaaggtggggctcgcgtccagctcagatttcaaatgggtatcgggccatctgaaggaattaggccagtttgatgaatttgaagtgattcagacggctgacgacgtagaagaagtgaagccgaatccggagctctatctgaaagctgcggaacatttaggcgttgaaccatctgaatgtctggcctttgaggattcggtcaacggctctatcgcagccaaacgggccggcatgaaatgtgtcatcgtgccgaataaggtaacaagcgccctgttgtttgaagaatacgatcacagactggaatcgatggcggaaatggaacttgaattactcttacagcgattgaacgatcaaaacgaaccggcagggggaagcagcattgtctgagaaacttgatctgacccgttttgaaaagaaaatggtcatccgaaatatggaagagaaagatatcaacaaaattattgagctgcaaaaggattgttttccggggatggagccgtgggagcctgagcatttaatcagccatctcgcgcactttccggaaggtcagttttgcgccgagtatgaaggggaaattatcggttcatgctcaagcctgatcatcaatttcgatgaatatgatgaccgccacacgtggcaggacattacagacgacggttatatcacgaaccacaacccggacggattgaatctgtacgggattgaggtaatggttcacccggaatacagacggatgaaaatcggacaccggctgtatgaggcgagaaaagacttggcgagacgattgaatctgaaaagcatcattatcggcgggcggattccgaattatcataagtatgcggaagaaatgacggcgagagcctatgtcgaacaggtgacgcgccatcagatttatgatccggtgctttctttccagctgatgaacggatttacgctcatgcggatcaatccgaattatctcccggatgacaccgcgtccattaaatatgcgacattaatggaatggaacaatgtcgattacctgccgcagtcgaagcgctattacaaatcggcatttccggtgcgcatctgcgtcattcaatatgaaatgaaaaagatttactccttcgaggaatttgccaatcaggttgaatattatgtcgatgtggcttccgatgcaagatctgatttcgcggtgttcccggagattttcacgacgcagctgatgtctttcctcgaggagcgttctccgagtctggccattcagaggattaccgaatataccgaggactatatcagcctctttacagatctcgcggtgaaatataacgtcaacatcatcggcggctcccacttcgttgaagaagaggggaaaatttataacatcgcctacttattcagacgtgacggcacgattgaaaaacaatataagcttcacattacgccgaatgagcggaaatggtggggcatcagcgccggagacagggtgcgcgtatttgatacggactgcggaaagatcgccattcagatctgttacgatatcgaatttccggagcttgcgagaattgcagcggatcaaggggcgaaaattatctttacgccgttctgcactgaagaccgccaaggctacttgcgcgtaaggtactgctctcaggcgagagcggttgaaaaccaaatttacaccgtcatctcaggtacggtcggaaacctgccgcaaacagaaaatatggatattcaatacgcgcagtcagccatttttgctccgtctgattttgaatttgccagagacggaatcgtcggtgaaacgaatccgaatatcgaaatggtcgtgatcggggacgtggaccttgaaatcttaagaaggcagcgtgaaaacggaaccgtgcgccagctgaaagatcggcgcaaagatatttaccggattacgcatctgaaataaaaaaacgcccgctccgctgggactgccccccgtttttgagacaggggtcaaaacaccttttaaacagccaattgccgatagtttatcggtgattggttgtttagtttggtttgaatacgaatattgttataataatgaatgtattctatgacagtgcgttctacgatggcagtcgtagttcgatcaatgctgttaagatagaacgtttcagactttagcgaggaatgaaacgattcgatggaggcattatcagcgggcgtccctttgcgggacatgctcatggtaatgccttttgttttaacagctttttgatactcgtaagatgtatacacagaaccttggtcactatgtaacacgcagttctcaggcagcattggtagctgatcaagtgtgtctaagacaaaggctgtgtcctgcttatccccaatcgtaaaagcaatcacttctccattgtataaatctaatatactggaaaggtacaattgtttctgtccataaggcaaatatgtgatgtccgttactagtttttcaagaggacgatcagactgaaagttccgatccaatatattatcgaccacggcatatggctgcccatccttcttgcgctttttcaccttaacccgacactgccattgatttttttgcataatacgttgaaccgttttatggttaatacacattatcttttttagtatggctgtgatttttcgatatccatatcgatacttgtgctctcggcacaacgtgccgatttgtttttccaaatggcgcttgggatgatccttcatcagattcttcttccaacgataataagacgctcgagagatacctaaatgaatacagatatcctgtacggtcattgtgctgtgcaatatttctacaagttcgactgacgtttcgctatcaacttcctttccaattcgttgtacttttttaacacttcattctgttgtctcaggtaacgaatctctgcctgcagtttctctaaatcggaagaatactccggaccttttccgtaagtgtattgctttccaacaggctgttcgaatcgatgtgtatcaccagccttataccatctaacccatgtctgaacctgtgtcttattcttaatattcaactcctgcaggatctctttcataggtacgcctgccaatctcatttctacagccttctgtttcgcttcaaccggataactcactcttgtccccatagaaaaaacacctccaagtctaatttcggataacaatcatccgtattcaaacttgaaggtgtttttatttgtctcatcttatggggtcagtccccgcttaaggggcgggtttttttataaaaacacttgcaccggccccggtttcgggatatgctcttgtagccctttcgctttctgggagaaagcgtttttttaattgccgccgctttattgactcgcccatgccgcgcctttatattcttattaagaggaatacttcaccaagagaatcggcgtcagaagccgggcagctttcgatacagtgcaatgatattgaaagggagatgagcggtgtggaacatgtacaaaaaaatcagtcactcaaacaaaaggataaagagctgatttggcacgcgatgaaaggggcggagccggatgacagcataatcgtccaaaaaggggaaggcgcctgggttacggatattgacggcagacggtatttggacggcatgtcaggactgtggtgcgtcaatatcggatacgggagaaaggagcttgccgatgcggcttacagccaattgaaggagcttccttattatccgctgacccaaagccatcaacctgcgattgagcttgcggaaaaactgaatgaatggctcggcggcgattatgtgatcttcttttccaacagcggatcggaagcaaatgaaaccgcgttcaaaattgcccgccaataccacattgaaaacggcgatcacagccgcttcaaattcatctcccggtacagaggctatcacggcaatacgatgggggccctcgctgctaccggccaggcgcagagaaaatataaatatgagccgctctcacaagggtttttgcatgcggcgccgcctgatctttatcggaatcccggcgatgccgtcacattggaaagcgctcatgacatcgaccggatcatgacgtgggagttaagcgaaacgattgccggtgttattatggaaccgattattacaggcggagggatactgatgcctccggacgggtatatggcaaaggtagaggacatttgccgccgccacggcgcgcttctgatcagtgatgaagttatttgcggtttcggccgcacgggagagccgttcggatttcagcattacggcgtttcaccggacatcgtcacaatggcaaaaggcattacgagcgcttatctgccgctgtcggcaacggcagtaaaacgggagatttttgaggcgtattcgggcggtgagccgtacggccgcttccggcacgtgaatacattcggaggcaatccggcagcctgcgccctggctttgaaaaacctgcaattgatggaggacgaaaatctgatcgcccgctcccgggagcttggagaaaggctgctccgtgaacttgagccgctcagagaacatccggcggtcggggatgtacggggcaagggccttcttgccggcattgagctcgtcaaggacaaaatcacgaaggaacccgctgatgccgctcttgtacagcacgtcatcaccgcgtgcagagaaaaaggcctgcttgtcgggaaaaatggcgatactgtagcgggatataataatgtcattcagctgtcgccgcctttttgcctgtcggacgaggagctctctttcatcatttcgaccgtcaaggaaagcgtgctgagcattgatttttaatgtaaaggagtaaaacatgagttttcacaaccagcagattctaccggcaatccggaacatgaagcaattcgatgcatttttagaaagtccgttcttatacggcgtcattttagatatccacctcggtcaattaaaaggtgtcgtgaatgaagcgaaaaaacacggaaaacttctgatggttcacgtcgatttaattcacggcattaagcatgacgaatacggtgcggagttcatttgtcaggacatcaggcccgccggcatcatttcgacgagatcatcagtcatcgtcaaagcgaaacaaaagaaaatatacgcgatccagcgtctgtttctcttggatacgagcgccatggagaaaagcatggaattcgtcggaaagcataagcctgactttatcgaggttctcccgggcatcgttccgactttaatcagagaaattaaagaaatgacagggattccgatttttgccggcggcttcatccgcacggagcaggacgttgaaaacgccttgcaggcaggagccacggccgtgacgacttcagacaccgaactatgggctaaatatgaacattctatgacaaaaaaagattgacaccgcttacacccattgttacaatagacctaggttaatactatgtgatggagacccggagacccacaacagctctttacggaagcaataaagcgtaaagcggtttgttgtgggttttttattctctataactctgtcaaacctgctattatgtcatttaggaggaatgatgatgacagcattttggggagaagtaatcggtacaatgctgcttgttattttcggcggcggcgtttgtgcgggagtcaatttaaagaaatcgctttcataccaatccggatggattgttattgtattcggctggggattgggagtagccatggcggcatatgccgtcggcagcatcagcggcgcccacttgaatccggctttaacgataggccttgcgcttgaaggcagctttccttggaaagaggtccctgtttatattgcaggacagatgatcggagcaatgatcggtgcggttgttgtgttccttcattatctgccgcattggaaggcgacggatgatccggccgctaaactgggcgttttctcgaccggcccgagtattcctcatacatttgggaatatgataagtgaagtcattggtacgtttgtgcttgtgctcggcattttggcaatcggagcgaatgaatttacaaaagggctgaacccgctgattgtcggattcctcatcgttgccatcgggatttctcttggagggacgaccggatatgcgatcaaccctgcgcgggatttggggccgagaatcgctcacgcctttctgccgattccgaaaaaagggccgtcaaattggaaatatgcctggattcccgtaatcggtccgatcatgggcggtgcgttcggcggcgtattttacaatgccgcgtttaaaggaaatgtgacacctagcttttggtttgtaagcgttataatggttgtagtgcttttcatactctatatttataccaagaaatctcaatcacagaaaacattatcaaattctgaatatatttaaaaaggagagcggcatcatggagacctatattttatcaattgaccaaggcacaacaagttcaagagcgattctttttaataaagaaggaaaaatcgtgcattccgctcaaaaggaattcacacagcatttccctcagccgggctgggtggagcacaatgcgaacgaaatctggggatcggtgctcgccgttatcgcgactgtgatctccgagtccggaatcagcgctgatcaaattgccggcatcggcatcacgaaccaaagggaaacgacggtcgtatgggataaagataccggaaagccggtatacaatgcgattgtgtggcaatcgagacaaacatccggcatttgcgaagagcttcgtgaaaaaggatataatgatacattcagagaaaaaacgggacttttgatcgacccttatttctcaggaacgaaagtcaaatggattcttgacaatgtagaaggcgcgcgggaaaaagcggaaaacggaaatcttctgttcggaacgattgattcatggctcatctggaaaatgtccggaggggcggcgcacgtaacggattattccaacgcttcaagaacgctgatgtttaatatacatgaattaaaatgggatgacgagctgcttgatattttaggcgtgccgaaatcaatgctgccggaagtgaaaccgtcttctcatgtgtacgcgaaaacggttgattatcatttcttcggtaaaaacattccgattgcgggagcggccggagaccagcagtctgcgctgttcggtcaggcgtgctttgaagaaggcatggggaaaaacacatacggcacaggctgctttatgctgatgaataccggagaaaaagccatcacttctgatcacggccttctgacgacaatcgcctggggattagacggaaaagtcgagtatgcactggaaggaagcatctttgtcgcaggttctgccatccaatggctgagagacggcatgcggatgttccaagattcaaaagaaagcgagacatacgcagagcgtgtggattccgctgacggtgtttatgtcgtgcccgctttcgtcggattaggcacaccgtactgggacagtgacgtgcgcggctcagttttcggcctgacacgcggaacgacgaaggagcattttatccgggctacgcttgaatctctcgcttatcaggcgaaagatgtgcttgatgccatggaggctgattcaggcatctctttaaaaacattgcgtgtagacggcggagcggtaaaaaataacttcctcatgcagttccagagcgacttgcttgatgtgccggtcgaacgtccggaaattaatgaaacgacggcgctcggtgccgcgtatttggccggaatcgctgtcggctactggaaggacagcactgaaatcgctgatcaatggaaccttgataagcaattcaaaccggaaatggaagatgaaaaacgcgatgaattgtacggcggatggaaaaaagcagtaaatgcagctatggcttttaaataagataaaaatgtggtatactgaaaacaagttaataggaacggtcctgagatgaggagagaccacagcaccaaagtgataactgcgctttggctgttgtggtctctttttctataccgtgacaacaaggaggaaacgtaatgatgaatcaccaattttcaagtttggaacgggatcatatgctggaagacatgactaaaaaaacatacgatctgtttattatagggggaggtattacgggtgccggtacggcgcttgacgctgcttcaaggggaatgaaagtcgctttgagcgaaatgcaggatttcgcggccggcacatcaagcagatccacaaagcttgtccacggcggtttgcgttatctgaagcaatttgaagtcaaaatggttgcagaagtcggtaaggaacgtgcaatcgtgtacgaaaacggcccgcacgtcacgacgccggaatggatgctgctgccgtttcataaaggcggcacgttcggttcattctctacttccatcggcctgcgtgtgtatgactatttagcgggagtaaaaaaatcagagcgcagaagcatgctgtctgctaaagaaacgctgcaaaaagagccgctcgtcaaaaaagacggcttaaaaggcggaggctattatgtagagtaccggacggacgatgcgagactgacgattgaagtcatgaaagaagccgttaaattcggtgcggagcctgtcaactattctaaagtgaaagaactgctttatgaaaaaggaaaagttgtcggcgttttaattgaagatctgctgtcaggcaaggaatacaaagtttacgccaaaaaaatcgtcaatgcgacaggtccgtgggtcgacgagctgagagaaaaagaccacagcaaaagcggaaaacatcttcagcacacaaaaggggtccatctcgtattcgaccaatccgtattcccgcttaaacaggcggtgtactttgatacgccggacggccggatggtgttcgccattccgcgtgaaggaaaaacatacgtgggtacgaccgatacggtttacaaacaaaaacttgagcacccgcgcatgacggtgcaggaccgcgattatgtcgtcagctccatcaattatatgttcccggaactgaacattacggcggacgatattgaatcaagctgggccggcctcagaccgcttattcacgaagaagggaaagacccgtctgagatctcccgtaaagatgaaatctggacatctcaatcaggcctgattacgatcgccggaggaaaactgacgggctaccgtaaaatggctgagcacattgtcgaccttgtccgcgaccgcttgaaagaagagggcggccaagacttcggcggctgcaagacgaagacgatgccgatttccggcggacatgtcggcggctctaaaaacttcgagtcatttgtggaagcaaagacaaaagacggcttgaaaatcggtttatcacaggaaaccgctaagcagttagccatcagatacggctctaacgttgaaaatgtattcagccggattgaaggtctgaaagacgaagcggaaaaacgccagattccggttcacattctggcggaagcggcttacagcatcgaagaagaaatggctgcgacacctgccgatttcttcgtccgcagaacgggaagactgttcttcgacatcaaatgggtgcaaacgtataaaacggccgtgattgattacatgagcgaccgattccaatggaatgacgaaacgaaagaaaaacacactgagtggttaaatacgctgctgcacgacgcggttgttccgctcgaacaataataaccggagggctgtgccgaaaaggcatgagcccttcttttatctttttacataaagcatttggttaagttatcaagtgacacgggcagccgcttcatattaaaatatggtcataagctgaaattataggaggacgaacatgagttggagtaagagttacgaacgctggaatcaggccgaacaattagattcagaattgaaaaaattattggcggacgcagaaggaaacgagcagctgctggaagattttttctacaaaaatcttgagttcggaacaggaggcatgagaggagaaatcgggccgggtacgaacaggatgaacatttacacggtccgcaaagcatccgccggacttgcggcgtatatcgcgaaacagggggaagacgcgaaaaaaagaggggttgcgatcgcatacgactcccgtcataaatctcctgagtttgcgatggaagctgcaaaaacccttgcttcccaaggcattcaaacatacgtatttgatgagctccgcccgacgcctgagctgtcttttgcggtgagaaagctgaacgcttatgccggtatcgtcgtgacggccagccataacccgcctgaatataacggatataaagtgtatggcgatgacggcgcacagctgccgccgaaagaagcggacatcgtcattgcggaagtgaatgccatagaaaatgaactaacgattcaagttgaagatgaacagtcgctgaaagaaaaaggtttgattaaaataatcggtgaagaaattgataaaccatatactgaagaactgacttccatctccgtacatcccgagctttcggatgaagtggatgtcagcgtcgtgttcactccgctgcacggcacggcaaataaaccggtgcgccgcggtcttgaagcactcggttacaaaaacgtcaccgtcgtgaaggagcaagagctgccggacccggatttttcaaccgtcaaatcgccgaatccggaagagcacgcggcattcgaatatgccattaaactcggagaagaacaaaacgctgatattctcgtcgctacggacccggatgccgaccgtctcggcattgccgtaaaaaacagcgaaggcaagtacacagtgctgacgggaaaccagacaggcgcgcttttattgcattacctgctttccgagaagaaaaaacagggcgcccttcctgaaaacggtgtcgtcatgaaaacgattgtcacgagcgaattgggccgcgccgtcgcttcatcgttcggattagatacggttgacacactgacaggcttcaaatttatcggtgaaaagatcaaagaatatgaaaaatcaggccaatacacgttccagttcgggtatgaagaaagctacggctacttaatcggcgatttcgcgcgtgacaaagacgcgatccaggctgcgctgttagccgtcgaggtatgcgccttttataaaaagcagggcatgtcgctttatgacgcgctgctgtccatttttaaagaatacggttattaccgtgaaggcttgaagtcattgacgttaaaaggaaaacagggtgcagagcagatttccgctatcctgacttccttccgaaacgatccgccgaagcagatggccggaaaacaaatcacgcaggctgaagactattcaacgggaaaacggactgtatttgccgatcatcatgaagaagatattgatctgccgaagtcaaatgtcctgaaatatttccttgaagacggctcttggttctgccttcgtccatcgggaacggagccgaaagtgaagttctatttcgccgtgaagggaacttctttacaagacagcgaacagcgtcttgccgcattatctgaagccgtcatgaaaacagtggatggcatagtggaaaaaacgaaataaacaacaaaccgccggaagcgacatccggcggtttttttatgcgtctcatccgaaagtatgaggaaaattcatgctgaaaacaaaggaatatacagaaaagaattgatataatatggataattctgattggccggagtgagggaaattgacgaaaacgacggtagaaacgttaaaaacgttaaaagcgattgcggaaaccttaaaccaaagccacgatttaaaggaagcgcttgataaagtgctccgcgaactgctcagcctgaccgggctgcagacagggtggatttttctgattgagccggacgggtcttatacgctcgccgcatccgcttatttaccgccggctctcggtcagcgggaaaatgcactgatttgcagcggggaatgctattgtctgaccaaattcagcaatggcggattgacaaaggccgtaaacataatgaattgtaaacggattgaatttgcggaacagacgacgaactgccgcgatacggagggcattacccatcatgcgaccgtaccgcttgaggacggcggccggaagttcggtttattaaacgtcgccgcaagcgaaaagacatttttcaacgaagaagaactgcatctgcttgaagcggttgcatttcaaatcggaacggcgattcagcggatgaaattggccgaatttgagcagcagaacgccctgttgatggaacgaagcagacttgcgcaagagctgcatgattccgtcaatcagatgctgttttctgtcagcttaacggcaaaagccgcaaagagctttacagatgatgatcggctccggcagatgattacgtttattcaagagctgtctcaggatgcgctaacagaaatgagggcgcttatttggcagctgaagccggaaagtttgacgaaagggctgtatgcgtcgatcaaaagctatgccgctcttatcggcctggaagccgtttgtgaaatggaggatgagctggagcttacggatgaacaggaacacgcgctttggcggatcgcccaggaagccttgaataactgtaaaaagcatgcgggaacggaccgggttatcatttccgccgttaaaaagccggattgcgcggagcttcatattagcgaccgtggagcgggcttcagcgctgatgcgcatgctgtgctgccgtcgctcggcgtgaccggcatgaaagcgcgcgccgaagcaatcggaggccgctttacattgcaatccgagattggcgccggaacgattgtctccgttcggcttccatttcgggacaggaggtctgattgatgaaaattgtgattgctgatgatcatcacgttgtccgcaaaggactgcgctatttcttcgccactcaggaagacattgaagttgtcggtgaggcgtccaccggtgctgaagcgcttcagcaagctgaaaagacggagccggacatcattctgatggatttatcaatgcctgatatggacggcatagaagcggcaaaaattgcggctgaacgatttccggacatcagtatcgtcgttttgacgagctattctgatcaggagcatgtcattcccgcccttaaagccggcgcaaaagcgtatcagctgaaagacgcccagcccgatgatttagtgaaaacgctctgggaagtgtattccggacgttaccggctgtcggcggatattgtgcctcacgtgctgacccatatggttcaggatgatcaggataaggaaaaatatgatcagctgaccccccgtgaaaaagatgttcttcaagaaatagccaaagggaaaagcaataaggaaattacggcggcactgtttatttcagaaaaaacagtgaagacccacgtatccaacctgctgtcaaagctgaatctttcgatcggacgcaggcggcattgtatgcggtaaaatataatgtttttggaaaggcggtaaaatgatgagcatattagtgatcagcggaacaccgagaaaaaacgggcggactagaattgccgcttcttatataagagatcggtttcataccgattttattgatttgagcgaaagtgatctgccgctttataacggtgaagaagaacagaacgagctgcctgcagtgcaagagttaaggcggcaggtgaaaaagtcggcggccgtcgtcttattatctcccgagtatcacagcggcatgagcggcgctttaaaaaacgccatcgattttttaagcagcgatcactgggcatacaaaccggtggcaatcattgccgcggcgggcggaggaaaaggaggcatgaacgcgctggcgaatatgcggacggtcatgcggggcgtttatgcaaatgtcatcccgaaacagctggtcttagatccgattcacattgacatggagcgccggaccgtatctgaggatatggcggtcagcctgaaagagatgatcgaagagctgaatatgttcacaaatacaagaaatcccggcgtctgacgccgggattgttttatgtcagcatggctaattgatcttcataagcgagttctgtcgcatgatcaatatacccgagaagggaatacagctctttttcaagcaccgcatgatcatattcgaaatgatacgcgtgcagaaagtgctcaatacgctttgataataaatcatcttttgtacgaaccatcaaaattaacaaattgtcccattgagaccggtgtgtgtaatacaaggctttatcataatccgcatgatccatcttacgcttctcctttcaatgagaagttctccgttagtttatgccgtcgaagaccgatgcaacgggggaaaagttggtggccttatcacagcggcatagcaatatgagggagacataaaataaaaccgcatatccgtttcttctttggacacgctaagattgacaaaaaacgactcaggagaacataaagatgaaatcccttccatttgtgcttgccctcttgttttgcggcattctcattgcctcgatcgctgaaaaagggcatacagaacaccttgatccgtcagttgaaaaatgggaacagctcgcatggaaccagcttgaacgtgaatacaagggggccgagcttaccgattattcgtacatgggccgtacaaaagtgaaccgggaacagacgaaagatgtgtttcgcgtaacggtgcaaacagcaaaagaaacgttttcatcccgtgctgaagtgtatttccatcccgtgacaaaacacgtgatcagcattaatattttcagactgtaaaaaaagctgcacagccttattgaggccgtacagcttatcagatatcagaagaaacgttttgcgccgaggtagcgctgtttccaataggagttgttcatgctggaaataacgacacccgaatcgttggcattaataaactggccgttcccgagataaataccgacgtgggaaggtccggctttataagttgagaaaaagacaaagtcaccgaccgccggctggctgactgatgtcatcgtattccagtagcctgcggctgaaagtctggatacagaagtgaccttattgagaacgtaataaatgaaaccgctgcagtcaaagcctctcggcgtcgtcccgccccatacatacggtacgcccagctgagcttttgcggcatcgatcattacattaatcttcgcgcttgttgaacctgtgccgcctgtgttgccggactgatttggtgtcgtgtttgtctgctgcccggtaatcgtcagcttttgtccgatttgaagaacatctgttttcagattgtttttctcgcggatctgctgggcggtcacattgaacttttgggcgatcacccataaagaatccccgcttttcacggtatatgtagtggttttccctgtatttccggactggttcggagttgacggtgaagtcgaagagccggaagatgacgttttggtcagcttaagcacttgtccgacccgcagcatgtctgacgtcagtttgttgatgcttctgatttgctgaaccgtcatattgtatgcgtttgcgattttccagagtgagtctccgctttttactgtataggaggacgtttgcgtctggtttttattttggtctgaattgtcttttgacggcgtgtttcccgaagaagacgttccttttgttttcaggacttggtttacgtagatcgtatccgtttttaagttgtttaatactttgagttccgcaatggtcatattgacgctgtttgcgatcttccatagtgaatcgccgagtttgactttatacgtcccggaagatgatgactgctttttgctgctgtttgagctgctgcccggcgtggtttttttctgatcggtgcttgaggaaactttccccgtcacttgcagcttctgtcccgcgcggattaagtcgcttgtcagaccgttcaattttttcagttcctgtacggacattttaaaatcagatgcgatcagccacagcgagtcgccgcttttcactgtataaacgcttttagtcgtgccgctgttctttgaagatggatttttgctgccggaatctgatttgccgttaggaatgttgagcgtctgcccgatagaaataacggtggattttagatgattggctgatgtaatggcatccacgctcgtattgtagttttgggcaagcttccataatgaatctccgcttttaaccttaatcgtttgtgcttctgccggtgttacagctaacgcagacccgacgatcgcagatgcagtcaaaccgaccgctaccttttttctcataatgaatctcccttttcctgcgatgattttactatccccattcgttgcagccgcaaggtgaggatatcagtaatgataatctttatatcggcacttgtctgcaatcgtttatcatattaatagaaatagtccttttttcttatgccggcataaaaaaaagaaggaatgcggacattccttcagcttctgagcagtctcataatctcctctttgtttttgaccagatcccttaacgtatatttgtctaaaacggccaggtaagcttgcagggcttcattcagaaggttctttaagttgcaggcgggagatatgatacagagattttttttggagtcaaagcattctacgatgttaaagtcgtcttctgtatttcgaacgacttctccaatgtttatgtcttccggtgtcattcctaaacggattccgcctccccggccccggatcgtttcgacatatccgagctggccgaggcggtaaatgactttcatgaggtggtttttagagatggaataagtatctgcgatttcttttatgttggaaagttcatcggaatgtctggaagccaaaaaaatcaaaacgcgtaaagaataatcggtatagttcgttaatttcatagaatgacctcgaaaaaagagattttgcttctgttacagtctatcatatatgaatctaaaatgaaaaaaaaggaatttgcccccttaactcaaaaaaaacgtgcgctccttctgagcacacgtttttttcgttaagacatcggcggcttccgatcgtcagccgattgatgtttttcaattttgcgatccaattttgcgagataacgggaggcgaaatcttttcctccaagaccgaatgaaagtccgaaggcaagcacgaaaccgcccagaatcagaataaacgcggcatttacgatcgtgtcggcgacaccgagctgatccagcgccataaagattgaaagagtgataatggtatatttcgcaagcggcgccaggaatctgaattcctttccgctcagcatgccggcaagcagtctgctgacgagctgtccggccaaaagtccgattccgagaataaatacagcggccagaacattaggcaggtaagcgataatacctgttgcgataacgacgagaaattcgagatgaacaagctgcagcgcctctgccgtaaacagcaggacgatgataatctgaacaatcatgccgaccgtctgagaaagcgtcagcttcggggtacccgtctgttcaaaacccattttaccgagaagagagtcgaaaccggcccggtgcaagagcccggatacaatgctgttgacccattttccgatccagatgccggcgatgatcagcacgataccgatgatgatattagggagcattgtgaagaccgtgtgcagcatggctgacgccggttcagaaatacccgccacatcaagccggtcaagcgcagaaatgatcaccggaatgaaaatcagcacgtagacaatcgttccgatgattgccgacaggcttgtatccttcaggtatatagaaagccccatacgtgcggcgagcctttccgtgccgatactcgccagaaagtttgtgacgatatcacggacgagacgggcaacaagccagccgattaaaacaatcagcgccgcggcgaataatttcggtataaaggacaaaacgctttggatcatatttgtaaacggccctgatactccgctgatttggagagcggccaagacgccgggcaggaacaagagcaagacgaagtaaaaaacgattcgtgaagcggccgtaacggatctgctcatctccgcttcttcagacaccattgtccattttctgagccggccgttttcagcgagtttcatgcccgcttttttgacgagatagctgaaaagcgaagcggccgcccagcccaacagcagaatcaggccggcttttaaaatgctcggcacagccgccgttatcgctgacagcatgctgacaaaaggcgaagccacggttgtcagatgcagaatgttaaagaatagaataaaaacgatgattaatgcgataaaataaatgactttactgatgactttttctgaggaatagcgcgccggctttgtttcggcgaacagtctgtcgtcgatttttgttttttgcaggcctttgtatacagctttttcaatgattttggcaatgccccagccgataagcaggacgagcagtgcaatgaccagattcgggagtttgctgagatacgtcgtaagcatgtctgctgtattcaagtagaatcgctccttttctttttggggtatggtgtgtgttttacccacttacatataaagcaaacggggcgggtgtgccgaaagttttcagacggaaaccggtctgttatttcatcttttgagaggaggggtcatacattataaataagtccaagtaggggggattcggttgaacgcggaggagacaaaaggtttacagcgggcaattgaggaaataaccgacattgcgaagggtttcggccttgatttctacccgatgagatatgaaatttgtccggctgagattatttatacattcggcgcgtacggcatgccgacgagattcagccattggagtttcggcaaacaatttcacaagatgaaactccattatgatctcggtttgagcaaaatttatgaacttgtcattaattccaacccttgctacgcttttttgctggacagcaattcgctgatccaaaataaattaattgtagcccatgttcttgcccattgtgattttttcaaacataactgccgctttcaaaatacgaaccgggacatggttgagagtatggcggctgcggcggagcggattaagcattatgaaagaattcacgggataaaagaggtggagtcctttttagatgccattctggcggttcaggagcatatcgatccgtcgctcgtcaggccgaagctgctgtggagcgtcgatgacgaagaggaggacgaagaagaaaccgcgccatcgccttacgatgatttatggggaatggataagccgaagcagctgaaaaagaaaaaagggaaaaaaccgtttccgccccggccggaaaaagatattctgctgtttatcgaggaacattcgcgggagcttgaaccgtggcagcgtgacattttaaccatgatgagagaagaaatgctgtatttctggcctcagctggaaacgaaaatcatgaacgaaggctgggcatcctattggcatcagcggattatccgcgagcttgacctgacttcagatgaagctatcgaatttgcgaagctgaacgcaggcgtcgttcagccgtcaaaaacgggaatcaacccgtattatttagggctgaaaatttttgaagacatcgaagagcgttatgacaacccgacagatgaaatgaaaaaaacaggggtaaagcccggttccggacgcgaaaaaatgtttgaggtcagggaaattgaatcggatatatcatttatccgcaattatttgacgaaagatctcgtaatgcgtgaggatttgtatttattccaaaagcagggcagggactataaagtgatcgacaaagaatggaaggccgtgcgcgaccagctcgtgaacatgcgggtcaacgggggatttccttatctgaccgtcaatgacggggattacctgaagaataatgagctttatattaaacattggtatgagggaattgagcttgatctgaaatatttggagaaagtgctgccgtatctgtaccagctgtggggcaggagcgtgcacatcgaatctgttcttgaagacagagaagtgatgttttcgtatgacggcaaaggagtgcaccggagatatctgtaaaagaagaaaggatgcggggaaacccccgcatcctttttttattttccgtgtttcaggatgtgaaagatctttttggcctggtccgtgttgtttaaaagccccgtaaatgactctcttcccggaccgtatgcgtaaacgggaacttcttcgcccgtatgatcgccggttgtccagccgctgttggttttcgcattaaagagcttaatgatcgctttgtagacgctcttgtcagcatcctgttttgcggccgtttcgatctgtttgatttcagcttttgaccatttcaggtctgtataacgcgcaagcacggaagatacggatttgcccgctttgatttggtcagccataaatgccggggtttttttggcggcaagaatcggttcaacatgccagtttttatcgtcattcgcgccgatcgtcaatccgccggtggtatggtcagccgtggcaacgacaagcgtatgtttgtcctttttggcaaatgcgatcgctgctttatacgctttttcaaaatccttcatttcactcattgcaccgactatatcattgtcatgtcccgcccagtcaatttggctgccttcgaccattaagaaaaacccttttttattcttgttcagcctgtcgatcgccgccgttgtcatgtcttctaatgaagggacggcgtttgagcggtcgattgctttgtcgagtccgccatcggcaaacaggccgagaatcttcttgttacgatcctttttgagctcctgttttgatgtcacgtagctgtatcccgcttttttgaaatcctttgttacattgcggtctttacggataaagtttgacttgccgcccccgaggagcacatcgactttctgttttccgttgatgcggtcatcaaagtagctgcttgcgatgtcatccatattttttctggatttgttatgggctccgaatgccgcaggggtggcgtgggcaatctccgaagttgcgacaagtccagtggatttccctctttgtttcgcttcttcgaggacggattttacccgctttccttttttatcgactccgatcgccgcgttatacgttttcacgcccgtggccattgccgtgcctgccgccgcggaatcggtaatattggaatcaggatcgtcagggtaagtcatcatcataccggtgagattggggtcgaatgccgtcagtttcataccatccgaaggctttcctttgttaatgaccgaacggtaggcgttcatatagggagcgcccattccgtcgccgaccatgaagatgacgtttctgatttcgtttttgtcaggctgtttttttgccgcagcctgttcggagtgctgaagccccgcgcccgcaatcagaccggctgtcagtacggatacggctgccgccggcagaagttttgatcgaacctgtttaaatagactcattctcactcgtcctcctttaatcgtgtctgcatgtctaatggtagggggtgtttgtaaagagcgcctgttcctcctgtaaatttcaggtgaaacattgttagaaatgtaaattccggtgtgaagttatgttttcaagaaagagtgaaaaccattcacttttttgaaaaagccgaggatttttttaacaaggggttatttggaaaataaactgctttgtttttccaaaatacgaggatcacaggaaaaaaacatgacaaattgactcgtttttcgtcacgtttgaaatcaaattgaaatatttaatacccttaaaaacttttttctaaaacgaattagtaagaaatttgtcacgggaagtcaagtctatttctagtggaaattgaaccttataataggaaacagataaaaactttaaaaaagagacacataaaatagatagaatcattcagggaggaaaatatgaaaaagcaacttgttacagcaacaacggcagtggttttggggacgactttgtttgcgggcgcggcatctgcgcaaacgattaaggtaaaaaaaggcgatacattatggggactttcaaatcggtacggaacgtcaattaattccattaaatctgagaataaattaaaatcggatatcatttacatcggccagacgctttcgatcaacggtaaatcatcctcaggttcaaattccggcagcaagtcatcatcgtctacatataaagtcgtaaaaggcgacagcctttggaaaattgcgaataaatataaaatgacggtaaaccaattaaaaagtttaaacggtttaaaaacggacctgatccgcatcggacaagttcttaaagtaaagggatcaacttccggttcaacgtcttcaggatcttcgtcatcaaagcagccttcatccagccataatgctgcacagacgagcctgaatgtaaacaagctgatttctgatgcgcaatctttaatcggcacgccgtatgtatggggcggaacaacgacttccggctttgactgcagcggatttatctggtacctattaaacaaacagacgagtgtcggcagaacgagcactgcgggatactggagctcaatgaagagcgtgtccagcccgtcaagaggagacttcgtcttctttacaacatatcaggccggcccttcacacatgggtgtgtacatcggaaacaacaagttcatccatgccggttctgacggcgtcgcaacaagtgatctgaataacagctactggaaaccgcgctaccttggcgcgaaaagattctagcagcgatagaaacccgttcatcagaacgggttttttatttagacgggacagagctccatttgtttcacctaaaatgaaaatgtgataaaaaatctaaaaaggttttctttttttcattttcatagagggcgatggcgtacgcgcccgcgctcggcatctgggcgaattcgcacggaatttcaatcatgctgcctgcggcgagttcggcccgtaccgctgacagcggcagaaatgagacacccagcccctctttaataaatcttttcgtaatatgcgtctgtgtcaccttcatcgtcctgacgaaaggaaactgtattctgacctggcggagcaaatcatcccaatagtcaggatggttatgggtcaaaagcagatattgtccgaacaggtcttttacttcatccgccttccctgttccgggttttcggccgggcggcgcgacgaggacaacggggtcattgtacagggggcggcaagtgagggaagatgattgcacctttaagcagctcagtccgatatcggctgagccgtttctgatttgagaggcgatttcttccgattcgaaaatggtgaccgtcatttcggtttctttattgtcctctgtataacgcttcatgacagacgggagaacggtgtcggcgataagcggcgaaacagcgagtgtcagcgtgtgcgagtagccctggcgcactctgtgcagctccgccatgctgttttcatagtcttccaaaagcctcatggcaaacggcacgtatgcttttccttcttccgtcaattgtattttccggccgcttcgctgaaacagcttgcagctgatttctttctctaataattttatatgaacggtgacggtcggctgagataaaaaaagcgtttccgccgtttttctgaaattctcatattttgccgcggtgacgaaggtgtgaagccatttaaaatccatagatgcactcctctgattaaaagttttaattaattcccttaaaaatattcattattttttaaatattatatttactataataacagaaagaggataagggggaatgaaattgatttatcgtggattgaaagggattacttgtgcagaaacggcgatcagccacattgacggagaaaaggggcatttaatatatcgcggctatgacgcgaaggatatcgcgctgcaatccagttttgaagaagcagcgtatctcattttgaacggggcgcttcctgatgagcggcaattgcttgcgtttcaggaagaacttgcagccgagcgcgggcttccgaaacatttgatcgacttactggaaacgcttccggatgaaatggacgacatggcggtgctgagaacggctgtttcaggtttgggcacagattcatttacatatccgcccaagccggaagaagcgattaaactgattgccgtcacaccgacgattattgcgtacagataccgccgtaaacaagggcaggaagcgttgtcacctgaggcgcgatacggacacgttgaaaactatttgtatatgctgacaggcaggcagccgtccgcagcccaaaagaaagcgcttgaaacgtatatgattctggcgatggagcacgggatgaatgcatcgactttttcagcgagagtcaccgtttcgactgaatcggacttagtgtctgccgtcactgccgcactgggtacgatgaaagggccgctgcacggaggcgcgccttcaggcgtcacgaaaatgcttgaagacatcgggacaaaagaaaatgcagaagcgtatttggcagcgaagcttatgaggggagaacgcctgatgggcttcgggcacagggtgtacaaaacaaaagacccgcgggcggaagcgctgcgcataaaagctgaagaagtggcgggaaatgatccgtcgcttgacttggcgctttatgtagagaaggaagccatccgcttgttagagcaatataagcccggacggaagctgtatacgaatgtggagttttacgcagcggctgtgatgcaggccattgatgtcgacaatgatttatttacgccgaccttttcagcaagcagaatggcaggctggtgcgcacacgtgcttgaacagtccgctgacaacatgatttacagaccgtctgcgaaatacaccggcgcttttcccgaaacggctcagcagctttaattaccggcatatttgtccgtttaactccccgcactgcgtggtatcgtctcagtaataccaattgcaggagtgtgagaatatgaatccgatggacagacagacggaaggacaaaagccgcaggtgcaaaaccgccagcccggcattgagtcagacatggagccgaaaccgctcttggaggacccggatgtaaaagggtcgggcagattaaaaggaaaagtcgccgtcatcacgggcggagacagcggcatcggcgcagcggctgcgatcgcttacgcgaaggaaggagcggatcttgccatcctgtacctagacgaacatgccgatgctgagagaacgaaaaagcgtgcggaagaataccaggccgaatgcctgttaatcccgggcgacgtcggtgatgaggcgcattgtcagaaggcggtccggcaagtcttagatcgctacggaaaaatagatattctcgttaataatgcggctgagcagcatccgcaaaacgggattcttgatattacatctgaacagctggagaagacattccgtacaaacatgttttccatgtttcatatgacaaaagccgtgctgccccacctgcaaagagggagcgccatcattaatacaacgtctattaccgcttatcagggagacacatcattgatcgactattcgtgcacgaaaggcggcatcgtttcctttacgcgttcaatggcgatgtcattggccgatcaggggatcagagtaaatgcggtggcccctggcccgatctggaccgccctgattccggcaacgtttactgaagaaaaggtggaaaagcatggtctggacactccgatgggaagaccgggacagcctgcggaacacgccggagcttacgtgcttctggcttcagatgaatcttcctatatgacggggcaaaccattcacgtaaatggcggcagatttatttcaacataatacgcaagtcttatcccgcgcttttaaaaagggcgggatttttatttgaacgtacatatgaatacgattttgaaaaatggaagtcgccagctgaatcactaatgttaatatttcacagtggagaatccgctgagttctgttttatgaaaactaaaaataatatatagaattttcaaaaagttattttcatttttatatttttcgctataatatgatgtaggagaaaggaatgatgtgctgaaacatttcatgcgaaaaataagaatttagtcattattgctattgttatctgaatattctaacatatattggtttacaaggagtgaagcagatgaaggggagcgtattcagaaagaaaagcattcaggacctgcttgccgcaacgagcggggaaaagtcgctgaaaagagagttaggggcctttgatttgacccttctggggataggggccatcatcggaacggggatttttgtattaaccggaacaggcgctgtcacggcggggccggggctgaccgtttcatttgtcatcgccgctcttgcgtgtttatttgcggctctgtcatatgctgaatttgcttcaagcgtcccggtttcaggttccgtctacacgtttacttatgcgacactgggtgaacttctagcgtttatcatcggttgggatttaatcttggaatatatgctcgccgtcagcgcggtttcggtcggctggtccggctattttcaatcattcttggcgggcttcggcattcatcttccgaccgcattaacggccgcgccaggatccattaaaggcacggtcacattctttaatctccccgcatttgttatcgtgcttgcgattacattcctcctctacttaggcattagggaatcgaagcgggtcaataatattatggtcattttgaaggttctggttgttctattgtttatcgccgttgcggccgtatatgtcaaacctcacaactggcagccgtttataccgatgggtttcggcggtgttttcagtgccgcggcgctcgttttcttctcttttatcggttttgacgccgtctcttccgccgctgaagaaacgaaaaatccggcgaaggatctgccgaaaggaattatcttttcattaatcgtctgcaccgtgctgtatgtgaccgtatcggcgattatgacgggcgtcgttccgtttgcccgctttgaaggcgttgaccatcccgtgtctctcgttctgcagatggccggacagaattgggtggccgggattattgatatcggcgcagtgttggggatgacaacggtgatgctcgtcatgctgtacgggcagacgagggtgatgtttgccatgtcccgtgacggtttggtgccgggggcgctttcaaaagttcatccgaagcataaaacgccgcacgtggtgacatgggtgttcggcatcctgtcagcattactcggctcgctcgtcccgcttgatgaactggcgaagctggtgaacataggcacgcttgccgcgtttgtcctgatttccgtggcggttatcgtattgagaaagaaacagcctgatctgccgagggcttttaaatgtccgggggttccctttattccgatattgtccattctgttctgcgtgtttttgattattaacctcggcgccacgaccatattccgtttctttatctggctgatcatcggtctggtgatttatttcttatattcgagaaagcattcgaaattaaacggggatttgtaaggagcggcacccgccgctcccttttatttttcggaataatgaaacatattgaaatgggcttaagttatcgcagtgaataagggataatatagggcggaagggaagtggaaagtcgtgtctgaccaaaaaagggttcaatgggcctcaaaaataggatttattatggccgctgccggttcggcgatcggcctgggagccatttggaagttcccttacgtagcgggtacgaacggaggaggcgctttttttcttgtattcgtcctctttaccgtgcttttaggctatccgcttttgctcggtgaatttattttcggaagacggagccagacaaatgcgattgatgcctacaaacaagccgcgccgaagtcggtatggcacctcacgggttatgtgggtgtggcggcctgttttttagttttgtctttttacagtgttgtcggcgggtggattttgctttatgtgttaaaagccgttacgggttctttatccgggctcactcaggagcagtacggaacggtgttcgggacggtcattgaaaatccgatccagactctcgttgcgcagcttgtatttatgatcatgacggtggcggtcgtcgcaaaaggcgtgcagaaagggattgaacgtgtcagtgcagtgctgatgccgattttattcgtgctgtttctattgcttgtgctgcgatcagtcacgctcgatcatgccgttgaggggattagatttttattggttccgcactttgaagatttgacgccggaatccatcctatatgctttaggacaggcgtttttcacattaacgctcggcgtttcggtcatggtgacatacagttcgtatctgccgaaaacccaaaaccttccgggatcggcgggttccattgttatgatgaatgtgctcgtcacgctgtttgcgggactggccatttttccggcggttttttcgttcggctttaaaccggatgaagggcctacactgctgtttaccgtactgccggctgtgtttgaccggctgccgttcggctcgctgttttttatcagctttttggcggtctttttcttcgccgcgctgacttcggccttttcgatggtggaaattatcgtggcgactgtcgggaaaggtgatgaaacgaaaagaaagaagctgtcgtggacaagcggtctgctcattttcttagtcggaattccgtcctgtttatcatacggtgttctcggtgatgttcatttgttcggaaaaacgttttttgatcttgcggatttcaccgtcagcaatgtgctgattccgctcggcgctttattaatatcaatcttcgtcccgctgaaaataccgaagcaggagctgtttgccgagatgaaaagcggttccgccatcggctatcgtttctttcaggtgtggtatttccttctgaaatatctcgtgccgctggctatcatcgtcgtattgctgcatttaatcggcgttctttcattttaaaaaaacaggcccccgtaaaagggcctgtttttatgtttaaaaaccgaattgcagattcgtatcaaccgcaacgatcgtatatacacagacaatgacgaacagattgagaatgacaccgagcagtcccgggcccgtccgtccttttttaataaacagctcaatgatgccgaacggcacggcggccatcgcaaacggcagcatctgataagaatagaaagtcacattgctgatgattgccacgttcaaaagcagcagcgacaaaatcgcggtaccgactgatatccagccgaaaacattatgctctttaaaaattcttaccaattccataattccacctcaccgatgtttgctgcttttactgttttgtttttcagcagacgttcgatttcttttgtcggccccgtcacgacagagccgtatacgttcattccgtgatgttcaacatagtcgattcggctgccaagattcatgtcttttcgtttcgatattgcatgcgcccattttttatggctggacataaattcaagggcattgataaattgttcacggtctgtctgtccttgcgtttcgaaagaggacaccatcttggaatctttcccgggaaatcctaacggctcggcataaggactgtctttcagatttttctccgtttcgaccgcgttccataaaaacttcacatcgtattttttaaaagtcgaatatacttgagaagaagggtaggccctgtcataagaaagatagacctccgccacgcttccttcaggcaatttttttaatgtctgtccggctttttcaatcgtgcgtccctttaagccggaaggatgggcgaaataatgctttgcctgtgccgcgtctagatcatagtagttaacggcaggcgatttgaccgtatctaaaaacatttcaatccgttctccgccgacggatttcgtttttgtgccgatctgcttttgcagcggaaattccgtattcattccaaacagcttcacctggcttttcagtccggaggtatcgacgaggacgttcggcattgtggtcgccaccgtcactgccgcggtctccattaattgattgccggtgctttcttttcctcccagaccgtaatagaggtagcttcctaatgtgcaaagcggcaaaatcatcaaagtggagatgacggcgagaactgaaatccgcaaatacgatttgcgttttccgtatgataaaatggccttctgtttttccgggctgatgccgacgtcccattcccggtcgtcctgcatttcgctttcaatcaactcctgatagacttccagcttttccagctcttcttcaaaggcggccatttcccggtcgctcatttctccatttttgtattggtaaaaacgctttttaaattcttcattcatcattaacacctctattataaagtgctttcagccgctgtctggcacgaaataaaacacttttaaaattagcctctgaaatattcataatatgggatgcttctttgtaattcagttcttttaaataatacagtgttaaggcctcccgataattgtcgggaagttcggacatataccctgtcagcacttccttgatttcaatctgatgagccgggctttgaacagccgtctgaaaaaggctcccaattaagtcatcggaaatggtcacttcctttttatgttttctgacataatctataaacgcatttctcgccacttgaaaaagccatggctttactttgctgtggtcgtaggagtgaatgtgtatgtatgccctcataaaggtttcctgcagcaaatcttcagcgagatgcttgtcttttgtcatggagagcaggaaccggtaaacatcattcatatacatttggtaaatttcatcgatcgtcactgccttttctcccctctatgttatacacgcataagaaaggtttaaagttgcacgttccatgcaaacggcttaaattcattttcacctcatcaaacaccatttctctatagtacccaaaatccgtcataaaagatagagatcggcggaggaaaaatataattattagtaccaggtaataaaaaatattgttataatagagagagagaacacttttgatcattacaacaaaggaagtgcgttatgtataagttttgtgcaaatgccatcaaatgcattctatccctgcgcggaggagtgaaagtgtacaataaagagaatcttccgtctgataaaggattcgttatcgcgtgcacgcatgcgggctgggtggacgtcctcacgctcggtgtcgggatattgccacatcagattcattatatggcgaaaaaagagctgtttcagaaaaagtggatcggacgttttttgaagaaaattcacgcgttcccggttgaccgtgaaaatccgggcccgagcagcattaaaacgccgattaagcttctgaaggaaggaaagattgtcgggatttttccgagcggcacgagaacatctgaagacgtcccgctgaaaagaggggccgtgaccatcgcccaaatgggaaaagcgccgctcgttccggccgcatataaagggccgtctacgggaaaagcgctgtttaaaaagggaaaaatgcggcttatcatcggcgagccgatttttttggaggacttttccgatcttgcgccgaaggagaggcttgcggccatgacagaagagctgaatgccagaattaaagagcttgagaaaaaacttgaacaactgtaaatgaaaaaaagcttgccgtctgtatcagacgcgcaagcttttttgttatgcttctttttgttcggcggtttccagcagttcatcaaacgccagttttttcacttcaatatatgcgacgtggtggccgtcaatttcattaatgataaattcacagccttcttcgataatcgagtcgtattgttcgacgtcgtatttctgggtaaggaaccagccgccgatggtgtcgacctcgtcattttccaaatggatgccgaggagttcgttcacttgatcaatcaggaccttgccgtcaagcatgtaatggccgtcgccgagtttacggatttcgttgatttcatcgatatcaaattcatcacggatttccccgacgatttcttcaataatgtcttcaacggtgacaagccccgcggttccgccgtattcatccgacagaatcgccatatgaacccgttccttctgcatttttacaagcagatcgtgaatcggtgccgactcaatcacatggatgatcggattgacaaaatcggtaatcggcgagtcgactgatacttcgccgctgatgcaggcggtcagcacttctttaatgttaataacgccgataatattatctttgtcaccctcttcgacagggtaccgggtatatttttcaatctgaatgatgtccatcatttcagaaattttgatatcatgcggcagactgacgatttccgtacgcggaatcatgatttcttttgcaagtctgtcgtcaaattcaaagattttgttcacgtatttaaattcagactggttgatttcaccgcttttatagctttccgataaaatgatgcgcagctcttcttcagagtgggcaagctcattttcagataccgtctccagaccgaacgtcttcgttaaaagacgggcggagttgttcagaagccagataaacgggaacatgatgcggtaaaaccaaatgagcggtttcgaaaacagcattgaaacggcttccgctttctggatggcgactgttttcggcgccaactctcccacgaccacgtgtaagaatgtaatgatcgcataggcgagaataaatgaaataatatgcgataatgagcttggtacgtttatctttgtgaaaagcggatgaagcaagcgttcaatcgttgattcgcctaagacaccaagaccgatggaagtcaatgttatgccgagctggcacgccgataaatactcatctaaatgcgtggtcacttttttgacaccgattgcggctttatttccttctgctataagctggtcaacccgtgagcctctgattctgattatcgcaaactcagatgctacgaaaaatgccgtcagcgcgattaaaaccgcgactaaaatcaaattcacaatgtccaattagaaccttcacttcttttgggaagatgaaggtaacacctcctgttagtaagataatggtttaacttaacagcagcataaatgattgaagcactgcaagcttttcaggagccagcctttttttcagctgggcgcgctcctctggttcaagcttttcaaaccgattcaagatcacggagatgttttgattcatgtgatcaatttccgatgccagatttccaatatcgtcaggcagggctgaagagggaaactggttctccagtcgatcttttatatcagacagggccaatcgctgctttttacaagcgactataaactttaaccgattaagtgcaagtgtatcgtagtaacgatagttcgaacaagacctgtcaggctttaaaagcccgaggtttgtgtagtaatccaccgtgcgtttcgttacaccggcaagctctgctaattcactgatgcgataagtctcagccccatctaaatccctccccaaccatcacgttatagttatgagaatagtttaatatatgaaggggagtttgcacaagtttattgttttccgtctttctcctgaaacggcgcggcgggctgtctgaaaaagcgttgactgcgccatgtaaatctttcataatcattgtaaatagaaacggaagaaaaagacagaagggacagatgacagtggccggtttatcacgggaagtgacacagaatctggagaaagggtcatggatacgcaaactatttgatgaaggcgctcggctgaaaaaagagttcggcgccgataaggtgtttgacttttcaataggaaatccggttgcggagccgcctgaaacatttaaaaaggcgctttgcgaagcggctgaaacagggcggcacggatacatacaaaaccaggggcttccggaggcgagagaaaaggttgcgcgctttttgtcagagcggtttcagacagaaatttccgccaggcatacagtcatgacggtcggagccggcggggcgctgaatgtcgcgctgaaaagcattttaaaccccgaggaagaagtcatccttctttcgccttattttgcggaatataaagcgtatgttgaaaattaccgcggcagacccgtcatctgcccgctgactgactcatttgagattgatattgaagcggttaaaggtgcgatcaccccccgtacgaaaggactgatcgttaatacgccgcataatccgacggggactgtgctcagccagaaaaaccttaacgaattgggcgccttattaaaagaagccgaagagcggaacggccaaagcatatttattttatttgatgaaccgtacagccagctgatctacggagaagagcaggcgaatccgtttcaggcgtatcagcgcgtgattttagtcagttcgttcagtaaagatctcggcattgcgggggaaaggctcgggtatatcgcggcagacgcccaaatgcctgagggcgatcttctgacggatgcgttcgttttctgcaaccggacgctcggctttgtgaacgctccggtcatgatgcagcgtgccgtggcgaaaatggatgatctttcgattgacgctgaaccttacagaaagcggagagaccttatggtggacatcctcacagaagccggtttcgaatttgaaatgccgaaaggaggctttttcgtctttccgaaatcaccgattgaagacgaggtggcattctgcatgcatgccgcacagaaatacaaactattgatcgtacccggcagcggatttggaaaaagcggctatttccgattatctttcagcgtgccttcagaacagatcagacagtcgcgcgatattttcaaagcactgtatcaagatttttcttcatagcttccaatacataaagatgggagaacggacaaatgtcgaggagaaataatggcacgtcagacatcagcattacaggaatcggagtcttaaccgcggtcggacaaggcaaggaggcgtttctcgatgcgctcatggaggggcggcacgcctttgatgtgatgaaacggcccggccggcagaaaggcagttcgtttatcggcgcggagcttagcgaattaacgccgccggacgcgctgtcgaagcgcttgtaccgaagggccgcgttatcaggaaagacggcgcttatcgctttatatgaagcgtggcatgacgctcaattagacggcgctgatcacagccgcaccggtctgatcatcggcggctcgaatatgacgcagcgcgaattgctgcaggcctttgagaaaaacggtgaaacgccgcaatttgtaaatccgacatacgggctttcttttatggatagtgatttgtcggggctttgtacggagcaattcgggataaaagggccggcctttacggtcggcggcgcgtcggcaagcggccaggcggcggttattcaggctgctcaaggaatcaaaggcggcctgtttgaccggtgcatcgtgatcggggcgctggccgatctgtcgtacatggagtgtcatgctctccgttctttgggagcgatgggcactgatacatacgctgaacggcctgaagccgcctgccgcccgtttgaccggcatacggacgggtttatattcggagaggcgtgcggggcgattgtgctggaacgcgctgaatctgccgaacagaggggcgcacgatcgtgggccggcttaaagggctgggggatggcttctgatgcgaaccgcaacccgaatccttcagcagagggcgaaatgacggtgatccgccaggcgctggagcgggccggtctttcagcaaaagagatcgattacatcaacccgcacggcaccggttcgccgatcggtgataagactgaatgccgggcgctttctgaaagcggcctgtcgcacgcgcggattaatgcgacaaaatcgattaccggacacggtctgagtgcggccggaacggtggaaatcattgctgctctcttgcaaatgcgggaaaacaaacttcatccgatccgaaacttaacggagccgattgacgattcatttcagtgggtgaccgacgggccgagcgcccataccgtacaccatgcgttaagcttaagcatgggattcggggggattaatacggcgctttgtttagaaaatcatttccgaagcagataacggcagccttctttttgaaggctgttttttatatcataaaaatctgaaaatgatgaaagaatggagttgtgatacaataaactatacaaatgacaatcatgctttgacttaggaggtggcaggatggggccctctgtgtagtcaatcacccatttcgttcctctcgcttaagaaaaaacgatgaaatcaggaggtgacgtccttatccttcaattcgggataaggtgaaatggacgatattgacagtttgattttaatcggtgtgctcattacgttaacggcatttttcgtggcgagtgaatttgcgatcgtcagagtgagaagatccagaatcgatcagctcatttcagaagggaacagacgggcggtgctcgcaaagcgtatcattacggatcttgatgagtatttatccgcctcgcagcttggcattacactcacatccatcgggctcggcgtactgggagagcctgcatttgagcggatgcttcatcctgtgtttcagggcatggggctgccggattctgctgagcatgtgattgcttttgctgcggcgtacgggctgattacgtttctgcatgtcgtcgtcggtgagcttgcgcctaaaacggttgcgattcaaaaagcggaaaagctgacgttatggattgccggaccgcttcggttattttacgtattcatgttcccgtttatttgggtgctgaacggctccgcgagaattctgaccggtttggccggattaaagccggcatctgagcatgaaggctcccactctgaagaagagctgcggatcctgctgtcagaaagtttaaaaaacggagaaatcaatccgtctgaatatacatttgtgaataaaatttttgattttgataatcggatcgccaaggaaatcatgatcccgagaaaagaaatcgcggctgtttccactgatatggacgtgccggaaatgcttgatatgatgctgaaagacaaatatacgcgctggcccgtaacggacggggacaaagacaatgtcatcggcatgatcaatacgaagcatctcttttcagatctgctgtttatgacagaagatgaaaaagcggaagtatctatcacgtcttacatccgcccggtgattgaagtcatcgagacgatcccgatacacgacctgctgataaaaatgcagagagaacggattcatttggcgatattgtctgatgaatacggcggaacgtccggtcttgtgacgaccgaagacatccttgaagaaatcgtcggcgatatcagagacgaatttgatgaagatgaacagccgcagattcaaaagctgtccgaacgccattatgtgctggacggaaaggttcggattgatcaggtgaatcatcttctcggcgcagggattgaagaggaagtcgacacgatcggcggtcttgtgctgaaacggaatattgacatctgtgcgggtgagtcgatacaaatcgggggatacactgccctcatagtagaaatggacggccggtttattaaacagcttgaactcaaagaagaacagggccgcccgggcggtcagggaacaataaaccgccagcttcccgtgcctgaaacggtcatgcttcataacgcaaccttgagcgaaaaataagctcaaggtttttttaaatggatatcataacaaagccgcaccagaacgccaaaaggcttccggctgctgaaacagcgatgtagagcaggctttccttaatgcggttgttcatcatcagctgcacggcttcaatactgaacgtggaaaaggtcgtaaacgcaccgaaaaagcccgtcgcgatgatgatgccggcagaaggattatccaggcccaggccggtgaacatgccgaggccgaaggagccgagcaggttgaccgcagccattccaagcggcatcggaaaaccttttgttctttctgaaattgttttacccaaaagagaacgtaataccgctccgatacccgctgcgattagcatcaggacaatcgtcatggtgtatcatgcccccttcccgctgcgtgaagggcaatccgccgtcccaaaaaaatgccggcgtatgcaagggcaagaccagcgaataaagtcgcggcagcataacaaaaagccgctgcgggagacgattgcagcagaaaaatggtttcttttgcgaaggttgacatcgtcgtgaaacctccgcaaaaaccggttcctaaaaaggcggtcaaaagagggcgtttagcccgaatgatgaaataacccgtaataagaccgagtaaaaggcttcccgccgcgttttcgaggaaagtggccgccgggaaagaaccgctgtgaatgtgcgcgctcatttcaaagcggagcaatgcgccaagcgcgcctccgataaaaattgcgatgtattgtttcatatcagccatccttagaaataaaatccggaaaatcagttacaatgccgtctactgccatcatttgcagtttttcggccgtcttttgatttctgaccgtccaggcaaatactttcaggccgtgtctgtgagcggtggaaatcaagaaccgattcagacgggtatatttaatattgacataatttacggctgatttgtaggcggccagctggcttttggaaaacatcccgaagctgggtcttgcaattattgcagtcggaacggacggatacatgtcgtgaaaggtctgaattgacttgaggctgaatgattgaacgatagggcggatggaaaaggaaaacctgcttaacagctggccgactgctttttcaagaccgacttgagaaacgtgccctttcagttcaattaaaaaaccgatttcagaatgataacgcttcaagacctcttcgagcaggggaatccgctcccctttaaactcagccccataccagctgccggcgtccagagactgcagcttcttcagcgtaaaatcttttacaaaaccggagccgtccgtcgtccggtcgactttgtcatcatggatgacgacaatctggccgtcttttgtgagctggacgtcaagctcaatgaaatcagcgttcatttcggcagcgatatcaaatgccgcaaatgtattttcgggcgcgtaaccggatgcgccgcgatgagcgatggtatacaagcttgtcagctcccctcatgggcatttctgttattatatcagattcgtatatgcacagcgattcaaactggtgaatgtgcgaaacagtatttttttggaataaagatagtgcttttttcggtttacaatccgcagtgatgatttataatggcaaaaaggaggcgagatcatgggaaaagggagattgaaagtggaagaaagaattaaggccgaaaccgatgctgaaatccaaaaagcgactctcctgaaacagacacaatcaaagaagaaatagtgcctgaccctgttgtatctggctgaaagatgaacgaatgtgtgaaaaccccggctgtgctctgaggccggggtttttcaggctgcctaaagacattaaaagaagctgatgtccgaatgttttagtataatagattttcgacaagacaaaggagcatatgccatgatgacacaatttcagagcttttttacgcttgaccatattttgcagatcagtatcagcatcggaattttagcggcttttctcgttttgagaaaactgtttgtcaaatacttttttcagctcatttacaaattggcaaacaagccgaaaaccgacatattcaaacagattgccgtagcgtttgacaagccggccaggtggtttttcgtggcgctgggtctgtttttggcgattgagtattcgccgtttttagacgggcagatggacattgtcaaaaaattgtaccgctctctgatcgttgcgctgatcgcttgggggctttgcaatctgacatcggcgtcttcgtttttatttcataaagtcaatcagcgctttgagcttgatatggatgacattttggcgccgtttttatccaaggtgctgcgctttgtcattctcgcgctcagcgtcagtgtgatcgcgcaggaattcaattatgatgtaaacgggttcgtggccggactcggacttggcggattggccttcgcgctcgcggctaaagatacgatcagcaattttttcggcggcattatcatcattacggaaaagccgtttacgatcggcgactgggtcgagacgtcatctgtgacgggaggcgttgaagatatcactttccgaagcacaaggttccgcacggcgcagggggcgcttgttactgtgcccaattcaacgctgtccatggaagccatcacaaactggacgaggatgacgaagcgccaggtcacgttttccgttcgtgtttcttatgcgacgccgattgatcgtttagagcggtgcatcacaaggctcagagaaatgcttcgtgaacatgaaggcgtgcatgatgatacgattatggttaactttgacgtgtttgcggacagctattacaatctgtttttcaacttttacacaaagaccatcgtttgggcggaaagcctggacgtgcggcaggatatcaaccgccggattattgatatttttgctgaggaaggcgtggagttcgcctatccgggccagaatgtattcgtaaaacagaaaagccacgatgatccggttcatgtgaaggatcattccggagaaaaagaacgggcatagcaggcgccgttcttttttcatgatatgataaaaagaaaaggcggtggaagagtggaagcgtttataacattgatcaatcaggcggaacgtatcgtggtgctgacgggagcgggaatgagcacggaatccggcatccctgattttcgttcggcgggcggtatatggaccgaagacacctccagaatggaagcgatgagcagggaatactttgaacgccgtccgcgtgacttctggcctaaattcaaacagctctttcagatgaaaatgagcggaagctatgagccgaatgccggccatacgtatttggcggatcttgaaaagcggggaaagcaggtagacattttcacgcagaatattgacgggctgcataagaaagcgggaagcagcagtgtctatgagcttcacggttcaattcagaccgccgcatgcccccgctgcggagcgcgctacgggctttctcatctgctgaaggacgaagtgccggaatgtacggcggaaatcggtgatcatgcggtatgcggcaccgtattaaaaacggatgtcgtgctgttcggcgatctcgttcagcattttgaaaccctttatgaaaagctagataaagctgatcttcttcttgtgatcggcacttcgcttgaagtggcgccggcaaggtttgtccctgaggatgcgggacggattcccggtttgaagcaggtgatcattaaccttgagccgacatattgcgaccatttatttgatcttgtcatccatgagaagatcggtgaatttgcaaaacggatcagcgccgcgacataaaaaaagccggatcatatacagatccggcttttcttattcatggacgggaatcatttgatccgtcagaacatcaaaggagtagccctgggctttcagtttttggatcaggctcggcaaagcgtgcaccgtcgcaggcagatcgtgcattaaaatgacatgcggcctgctcgtatgaacgctttccaaatatgcgagctgattcaatacttccggcacgtaccgtgcgtttttgtacttccagtcttcactgtctatcgtccagtcccagtacacgaatccgcctttttcgagattcttaatctgggcatccgtcaatgacggtttactgccgtaaggcgtgcggacaagatccgtttttactccggtgattgcctcgagtgtatcgcgtccctgctgcatttcgttcagcggtgatgtcggtgtttgataaaacaggtgattatcgtgcgtcacgccgtgcaggccgagcgcgattccttcctgcttcgctctttgcacggaatgcttataggctttcatccgcggttcaagcataaaaaaagtggcctttgcgccatttgccttcaatacattcaacagctgttcagtatatggagacggcccgtcgtcgaaggttaaatataccgtttttttccctgggtcacgctctctctgcaaatgtttcattaagacgtcgggagaatcatttttcagccgcaggctttctgcttcatcccgaagctgcccgtttgcggtcacggtgacctgtttgttttttgcggcggaagcggaatatcccattatgacgattaccagaagcagtccgcacaaaactgctaaactcgtaagtttaaaagccaatgaaaacagagaaggggaagcaccttcttttgtgttgcgcataacaatctctccagtagcataagtttctgcataatgccgataacagcggaggcttgcgaagtgccataagttaacagcatatgtatgtcgaatcaagtatacaggaacaaaactggaaaagacatagaaaagatgtcgaataataagattttaagaaaaaaataaactccgcagccggctcgttcagtatgatagaatagttgacaataacagctgagaatgcacatcacggcagataacgatgaggagggtttacatgaagacattagtaaacggccagttgattgatcgtgaagaagcggcagttgatattgaggaccgcggatatcaattcggtgacggtgtgtatgaggtcatcagagtgtataacggtgccttattcggtctgcgtgagcatatcgtccgtcttttcagaagcgccgcagaaatcggcatcaccctgccgttctccgcagaggacatagaatgggatctgcaaaagctcgtacaggaaaacaaactcattgacggcggggtctatatacagacgacgagagggaaggcgccgcggaagcaccagtatgacgaaggattggaaccgcagacgacggcatacaccttttcagtgaaaaaaccggaaaatgaacaaaaagccggagcgcaggccataacggcggaagacaaacgctggctgaggtgtgacattaagagtctgaatttactgtataatgtgatgattaaacaaaaagcctatgaagcaggcgcttatgaagcggtgctgataagggacggagcggtcacggaaggaacctcttccaatgtatacgccgtcataaacggcactgtccggacgcatcctgcaaatgagctgattttaaacggcattacgcggatgaaactgttagagctgatgaaagaaaacgggattgaggtgcgggagaaggctcttaccgaagacgaactcagggatgcggatgaaattttcatctcgtcaacgacggctgaattaatcccgatcgtaacccttgacggaaaaccggtcggaagcggaacgccgggacctgtagccaaaacgattcaggaggcttttcagtcgcacattcagcaggagctcggggttcagtcataagctgaaaaaaggccggaacacatccggcctttttacttcagtcagataaaaagagattcgatatgctgaacgagcacacgggagatcttctcttttgaaagacgctcaggttcaagcatggcatgcagcgccaatccgtcggcgatggcgtacattttctccgcttcgatctctttatcaagattcggtttcagaagcttattttcatccagccagtcaatcagaccgcggatatatgctaagatcccgtcctgctggggttgaaactcttctcccttatgtctggcataagctgtgaaagcgaaccatacctccatttcagccatcgtttcttcatctgtcgggatgatttcaagcatcagacgcaccgctttttctttcggcggcagatctttcatggcaacttcgttaattctggcggccgctttttcttttacgagtgtcatcgcataccctaaaagctcatcctgggtggtgaaatagtgcctcagcgcgcctaaagaaagacccgcttcctgggcgatgtttctcactgtcgctccttccattccccgctccaaaatcgtccgccaagtggcttcggctatttgttttcttcttttttcatgatcgattattttaggcatggttccagtgtaacaggaaatattttttcttgcaattttgtaatacagttgtattaaataaaaagcagtgatacaatgcattttagaaaacgataagggggaaccggattgaacgcgattgcttggttgattgtcatttgtgaggctgctttttgggcggctgtcatcttcggattggcggcgcgctatatattcaggcggcaaaagctcggaatgttttttttcgctctcattcctttattggatgccgtactgtttctggcggccgcagctgatttatacagaggggcggcggcgactatggcgcatgcggtggcggccatttatatcggagtgtctgtcgccttcgggaaaagcatgattcaatgggcggatgagcggttccgctattatgtggtcaaggaaggggcaagaccggtcaagcggtacgggctggattatgccaaacattatgcaaaagggtgggggagacatgtattagcgtttgccatcggcggcgttcttttagccggaacggtatttctcattcaggacgcttcccgcaccgaagcgctcagcaagctgttaaagggctggtctgtcgtattgtgcatcgattttttgatcatggcgagtttttttgtgatgccgaaaaaaagaagaaacagccgggagctgtaaaaaaagcagcttttgattaagctgctttacagaaagaattattttacgatcagcacgggaatatcggatttcgatgacagtttttcactgacgcttccgaataaaagttttttcagcctgttctggtcccggctccccatgacgatcaaatccgccgatatacggtcggcatgctcgataatggcatcagcgggatcaccttctaaaatgtcgatatccccgtcaatctggctgtcgttcatcagcattctcgcttccgcaacgatttcttccgtacggtcttcataaatcatcggatcaggggagattctttccgcctggagcggatcaggaacgcttgcaatcccgccgccgatatacgttgccccggctcccggcctcgggggatcaacaatcgtctgggtatcttttgcattgtgggaatgtacgaccgttaaatccgcgtgaaacgtttttgaaaggtctatggctttttggagcgcttttttactatcatcacttccgtcaaaagctgctatcaaccggtccgcgtgaaacatcggcctcatcctttcagtaaaaaaggtttgttttacaatacccgaatggcagaaatgtaaaacctgcattgacaaaaaaaggatttgtttatatgatgaaggaacaatatagggaaaaaggaggtatggatcatgtcaaaactaaagcttgtcaactcatcttcagctgaataccggcgtgactcccatacagcttccgttttctgaacatttgcttaaaaacgaggcagtcgcgcataaacggcgggtctgtaccttatttataataataagaggcatggagctgaggcttcatgtctttttttatacaaaaaaatgaaagaaagacaggtgtgatgcatgtggcggtattagcgaaaacaatgaaaaacaatccggaaaagcttgagggcggctgattgatgaaaggggatgacggtatttgtttactgtattaaaaaagctcgcgtggttttttaaagcctattggctgcgctatacgacagcgattgttctgttattgattgtgaatgtcattgaaatgtttccgcctaaacttctcggtaacgcgatagacgatatgaaggcgggcgtgtttacaaaaagcgggatgctgttttacatatgtgtttttctcgcattaacggcagccgtctatttactgtcttatttttggatgtatcagcttttcggcggggcgaatgtcatggagaagattctccgttcaaagctgatgggaaggcttcttcaaatgtcaccgccgttttacgagaaatacagaacgggcgatttaatggcgcgggggacaaatgacttgcaggccgtcagtatgacgacgggcttcggggtcttaacgctcgttgattcaacgatgtatatgctgacgatatttttgacaatggggcttctcatcagctggaagctgacatttgccgcgattattccgctgccgataatggcggctgcggtcagcctgtacggaaaaaagatccatgagcggtttacggaagcgcaggatgctttcggatcattaaatgacaaggtgctggagtcggtatccggcgtccgggtcatccgggcattcgtgcaggaaaaaaatgatgtcagccggttcggtgatatgacggcggatgtatatgagaaaaatatgaaagtggcgtttatcgattcactttttgaaccgactgtgaaacttctcgtcggcctcagctatcttatcggtctcggctacggcgcttatctcgtttttcaaaaccggctgacgctgggagagctggtatcgtttaacgtgtacctcggaatgatgatctggccgatgtttgcgatcggagaattaatcaatatcatgcagcgcggaaatgcctccttggatcgtgtcaatgagacgctttcctatgagcctgacgtgataggacccaagcactccgccggcatcaaggagcccgggcgtcttgtttttgaacaagtgactttcacgtatccgagcggagcgggaccggcggtttctgatgtatctttttccgtagaaaaagggcagacactcggcatcgtcgggaagacgggtagcggaaagacgacgatcattaagcagctgttgcgtgaatatccgcccggtgcgggagcaatcacgtttacaggcgttccgattcaggagattccgctcgaggagctccgcgggtggatcggctatgtgccgcaggatcatattttattttcaaagactgtaaaagagaatctgctttacggccggcaggatgcaaacgaagaggaaatcggcagtgcgctgaaagatgcgcattttgaaaacgatatcggcatgctttccgacggactggagacgcttgtcggcgagaagggcgtagcgctctctggcggacaaaagcagcgcatctcaattgcgagagcgcttttgaccgatcctgacattctcatattagatgattcgctttctgccgtagacgcgaaaacggaagccgccatcattgacagcatccgtaaaaaacggcggcataaaacaacgattatcaccacccaccggctctcggcagttgaacacgcagatctcattctcgtcatggatgaaggccgggtgtctgaaaaaggcacgcaccgggagctattggcgcaggacggctggtatcgaaaacaatatgagaggcagcagctgtcctctcttgaagaaggggggacgggcgcatgaagaccgggagaagattatggaattacgcgcttcaatataagaagctgctgatatgggcggtcgtcctgctcattattgcggtcggcactgagctgaccggcccgtttatcggaaaaaaaatgattgacgaccacattctcggcattgaaaaaacatgggttaaagcctctagggacgatccgggcgccgtcaggttccgggggcatgattatgtcagggaggaccggctcaaaccgggggcggacaaaaccggagaggcgcacatttatcaagtcggtgcgggctactattttgttgaccgtcccgtcagttttgacggaaaccgttcggtgtctgacggccggctgacaatatcaaacggtaaagaaagcaggtcatatcccgccattacgttatcaagacaggagatttttcaattttaccgtcccgaaataaaaggattgctgacgctgaccgccatttacgcgggactgctcatgttttccgtatgttttcattacggtcagcattatctgctgcagatgggagcgaaccggatcatacagcgcatgaggcaggatgtattttcacacattcagaaaatgccgatccgctactttgataatctgcctgccggaaaagtcgtggcccgcattacgaatgacacagaagcggtcagggatttatatgtaacggtgctgtcgacatttatcacaagcggcgtttatatgctcggcatttttacggcgctgtttatgcttgacgtcaggctggccgccgtttgcctgctgattattccgattttaatgatctggtcggttgtgtaccgcaaatacgcatccgtcttcaaccaaaaaatccgttccattaacagtaacatcaatgcgaaaatgaacgagtccattcaaggaatgccgattattcaggcgttccgccgcgaaaaggaaacgatgaaggaatttgaagaattgaatgaagctcattttcgctataagaacaaaatgctgtccttaaattccctcatgtcccacagtcttgtcaatgtgttgcgcaatctggcgtttgtcgggctgatctggtatttcggaggcgcgagtctgagtgcggccggaattgtttcgatcggtgttttatatgcatttgttgattatttaaaccgtttgttccagccggttacggggattgtcaaccaattttcgaagcttgaattggcccgtgtctctgccgccagggtattcgagcttttacaggaggaggaaacggaagaagaaggcgctctcgcagacagaaaggcggaagggacagtggaattccgcgatgtttcttttgggtatcgaaagggagaagaggtgctgaaacagatcagctttacagctgaaaaaggggagacggtcgccctcgtcggccatacggggtccggcaaaagctccatcctgaatcttctgttccgtttttatgatgcccaaaaaggagatatcctgctggacgataaaagcatatacggcatgtcgaggcaggagctgaggtcgcatatgggcattgtgctgcaagacccgtatcttttctcgggcacgatcggctccaatgtgacactcgatgatcagcgtatttctttggagcaggcggaagaagcgcttcgccaagtcggcgccgcaagtcttctgcaatctttgccgaagggcatcagagagcccgtcaccgaaaaaggcggcacactgtcctcaggccagcgtcagctgatttcttttgcaagagcgcttgtgttcgatccggccattttaattttggatgaggcgacggcgcacattgacaccgaaacagaagcagtcattcaaaaagcgctgcaagtcgttcaagaagggcgcacgatatttattatcgcccatcggctttccacgatcagacacgcagaccagattctcgtgctggaaaagggccgcattattgaaaagggaagccatgacgaattaatggcgcaaaaggggcagtaccaccaaatgtatgaattgcagaaaggaacggcgaagtccgcggtgtaatcggaaagggtgaatctaaagattcgccctttttttcattcagtaagccagtcccacccgttttctgacaaactgcgggctgatcagctcacggtacagaaagtgcgccgtgtctccaacggtgatttcagcgccgtcttcaggaaggcgatcctgttcgaaccggtaaactccggcagcgtctccgtcaggaaggtaggtgggacagatgatcgtccagtcaagatcctctgccagcagcatttcgtatacgcgggcgtgttcctttgcggctcttgttgattttcgttttgattctgccgattcaaaacggtattgatcaggcataagccgtgattgaaggatacccgcggtgccgatcgtaatcagacgatgaacatgatgccgtttcatgctgtctattatatgggtcatagcggctgaaagggtatcgtcaccgtccgtgccgagacagctcacgactgtgtccgctgtggaaatcaatcggcttacatcttcccgccgcttcgcattccctgttatgatttgtttttcaggaatgggaaggactgttccggatgatctgacaagagcgaatatctccatgtgtccatgtttctgcgcttcttttataaaagcctgtccgactcttcccgttgctccgagtaaagcgatgttcatgtaaaaaacctcctcgccgctcattatatcattcaaagcagcggggaaaagaatacctgtgaataaacgggaaatggtgggcaacatattcattgaccaaagagacacttacgaactgaaacagctcccaattgactgaggcaatgaatgacatgttttccctccttttttcctagggtatgtggaataggaaaaaagggtgacggcataaaagaagacgcggtatcccgcgccttctgtaagccatttattgagttattgtacgccttggccgcccatgttctgctgtgcgaaagatactaaacgtttcgtgatttctcctccgacagaaccgtttgcgcgagaagttgtttctccgccaaggtttacgccgaactcagaagcaatttcatatttcatttggtcgattgcttgagcagcgccgggtactactaggttgtttgaagagttgttgtttgccatttgtatgatctcctttataaagtagtatggttgggtttgctggaattgcaccagccgatgattttcggaacgaaaaccattgccagctcggcttcacccaatgctgtttgccgctttgtactacgtattatggtgaatcaaacggcatctcattcggaaaacggtgtggtaaatagcggaaggaaaaagaaaagcccagcctggtgcggctgagcttttagctttcagtcatatatgtgataaagcattaattcatgcagctcttttacgagagccggctcttcttttcccggatgtgtgtgtccccattcaatgtctccggacttatggtaaatcccttcgtaatgcgtaccctgccagtaaaatgaaatccgccatccgggcagtttctcttttttgaataacggtttccagctgaagtgcgaaatcatgacgttcacgctccttatgggaaatgttgatcttgttcattgtagctcatcgttcaatgcctgtcccgggtaaacctaaaaaaagacagcctcaccgccaaagtttttccggggcggtgatggaccgttctgataaatacgacgcgtattcaaaatttctccgttttgtcaggtaatcgaccgatctcagcttcggatgggaaaaaatgctgcgcccggggcgggaattggcttcaaacatccaaactttccctgaatgatcgacgccgaggtcaaaaccgatttcgccgataaaaccttcaatgtgctcatttaacacgcggctgaccgccaaggcggcttttgaaagtttccgcatcatgccgactctctctcgcggatcgccgtataattcagctaacgtcctgacttctccgccggttgccagatgcgtcgtgatgctgttttcaccggaaatttttgccgcaatggccgtcactgtccatttcccctcggcgtttttattcgtgtgcaccctgaaatcgacggggcgcccatccagccggatcagatcaatgccttgctgaattaaaaatgcggacgggtcattgttttctttaaatgatgtcatgaaggatgccgcatctgaatactctgccgtcaccaccgttttttcctcattcgtgtgtttgacagataagccggcatctgttttttccaccttataaatccccgtgccgagtgcgccgtctgcaggtttgatatagacggtgccaaacgtgctgcataacgtttctaacgcttccgcattcgggtgcaggacagattttggcagaagtgaagcggtgagactgtttttttccagaagcttatgaatgtcccatttattaaagaattgcggattaaaccacggaatctgatagtcattcatcagcctttgttttgtctgctgtaaaagcggaacttcttccgtttttcggctcgggagcctgtcatatacgacattcggaagcgggacggccgtccgtttccagctgttttctttataaatcagcgcttggacggtgccttcctcccagttgatctgatgggccccgaaaacgaaacaatatccgttcgcctgttcatgaagagagagcatcttggaaaagaaggctgtacggtctcttaacgggcgggacggcgatgatgtgaacccggctgtgaaaacgccgatcagcggtccgatgtgcaccgtctggccgtgtatgagaaagtcagcccggcttttatgcggtatcaacagctcctcaaacaaatcttcagaaaggagcgcgcttttttcaagtgattgagaaaaggctacacggcatttgacaaccttggtcccgaaggcagcggataaaagcccttcccgtttcatggaggaggggagaaacagcgtatttttgctttttttatcgatgccgacaatcatccctttatgattcacgcggtaatactcctttccggctttcctgtgactgaagttcgcggaagcgtctcagcggactcgtatacaaatcctctttcgcctccggagccacgcttaaaatagctttccgtcccggctttgagttgacatccaaaagccagatgcgtccgtctttggcataacaaatatcgagccccagctcaaacagcggcccgaaccgttcatcaaggaaataagggacggattgggtgatcgaaaagacatcatccaataaaacggcctgctgctttctcggaatttcctcaaaccatgtgtcaaacttaatcggttcagatcctccgggaaaatgagataaaagaccgttctgataaccccttctgaccgcttttccgaccgtttcccaaacgcctgactcagttttgcgcatgaaaatgcggatgtcgcacggatgccgctctttatcctggatatttaagtaggattgaagcaaatagcggtgctgcagcacttttttgcaccaagacttaaaagacacgtgattggaaaatgattttgtttgtttgttttttccgatatagtaagtggccgtaattgattttttgcctgtttcaagcaggatgatgcctctgcctcccgcgccgaaagcgggcttaagtatacatgctttttccttggctaagtatgattgcacctgttcatagcggctgacttcggccgtttcaggaatatagggactgatcagatgatgcttttggagcgcatccgtgaccgtccatttatcaggaagcccccggccgataaattccgttttccgatattttttcagccattcgacgatcggtttggctttttgcgcttcagcggattttccgtaaaaacagcggtcgtaaatatattcgggaatatcgatttccgtttcgttccactttccgctttgcgggtgatagacgagcgctttcacgcgcaaagaatccggaaaaatatcaaacggtgtaaaacgggctaagcgcacattatattgaggcgctctttcagccaattccccggcgtaatcttcttcgtgccggcgggatacagacataaaaccgagtgttgtcatattattactccccctttattcaaaaagccgctgatggaacggcccttccatccaataaatatgctaagcgcatcataaaagatgatctactgtaaagagtacgaaacagcatcttgccttattcctcacaaacaacaattcaggttcttcatttgcccgcatgcccgccagcctctataatacgaatagatatatcatcaagaaaatagaacataagatggaggcagaagaaaaggaatgggcatagcaggaacgtttctatttatgattgtaatcggagccgcgatcggcgcggtgacgaatcatcttgccattcagatgttatttcgtccatatcggccgtattacctgttcggaaaacgggttccgtttacgccggggctgatcccgaaaaggcgggatgaattggcaaaacaaatggggctcatggtgacgaaccaccttttaaccccggaaggaataaaaaagcggcttttatcagataccgttaaaaaccaggcgcttcttttcgccgaacaattcacgcaaaaaatggccgcttccgagatgacggtgcacgaagctttggccgccgcgggcatccggaatccgcaggaaaagacggatgcctggattgaccgttttaccgatgaaaagctttcggacctgtaccggaaatatgagcaccgcgccataaaagactggcttcctgatgagcttcaggaaaagctggatgaaaaagtcccgatggccgcagattatattctaaagcggagcattgattattttgagagcgaagaagggaaagacaggctcggaaatatgattgacgactttttgaattcccgggggatgctcggcagcatggtgcagatgttcctcggcaattcaagcttggcagaccgtgtgctgcctgagctgttaaagtttttgcgcaatgaggaaacgaaaaagcttctggctgatctgctttctcaagaatggggcaagctcaaatcttatacactttatgaggccgatgaaaagtggaatgcgaaagatctgctgttcagcatgaaaaagcgggctttggccgcacttcaaaccgcgccctttttcgaatgccggctcggtgacatcatctcccgttatgaaggggagattacgggaacgtacgcgccgaagctgcttgatgcggcgctcggcagtattgccgctcatttggaggatgtgctgaaacggctgcgtcttgaggaagtggtcaaagagcaggttgatcagtttcccgttgaacggctggaggaaatggtgctgtcgatttccaagagagaatttaagatgataacgtatttaggcggtctgctcggcgggataatcggagcaattcaggctttgtttgtcattcttttctaaggaaaacatacgccgatgatgaaagtcgctccgcagtctgttatagtggagtggtatgtccgaaaggaagaaaggagcggttactatggcagttcatttttatgatgcagcatatgatcttgaaaaagctttgcgaaacagtgatgaatacagccgtctgagagggctttatgatcaagtaaacgcagatgaatccgcaaaacgcatgtttgataacttccgcaatgtacagctgcagctgcagcagaaacagatgtcaggtgaagaaatcactcaggaagaggtagagcaggcacaaaaaacggttgctctcgtacagcagcatgaattgatttctcagctgatggaagcggaacagcgcatgagcatgctgatcggcgagttaaacaaaatcattatgaaacctcttgaagagctttacggcagcccggaataagctccacacccctccatctatgaaatggaggggtttttttattcaacagaaaaatcaagcgaaccttttaccgttccgttaatgatgacagacagagtgtgaattccccgataatgcttgcgggtggttaaatctttaagggaatgatgtttgctgaaggtttttacgtctccgttatccatggcggactccgacatcttaaacaccttgcggctgcggtgcccccttttctttacaaaatcaatcgcgtattcaaccctgactttttgccgggcggatgagcggatctgaaaagaaaaatgtatgcttgttccgatggcggccgtttccgaattcaatgtaaaacgttccaatgaaatccgggaggcgtcttcaaacccgaaaaccgcgagcgcctgtttgtctcctctttttaacagtgtcctgcaggcgtgcttcaaaatccagtccgtgtgcggacagctgccgaaccgctcggctgcgatctgtgccagaagatccggatgtgttttggagatgtcattcaggttattcgccacgctttttctgacatataacgagtcatcctgcatcaagcggtccagaacagggagaatcggagaaggatcttcaagaagagccggaatggagattccccatggcaggcgcggtcttgagccttcgctggcaagccttctgacatgttcgtccggatgctccgtccaggaaaggaactctttgaacatccgctcccggtcaagcctgatatacgggcggaccgcaaattcggaagtggaaaaacgagtgaaatactgaagcgccttcattgattcgtcccagtgatccgttccgtactgttggacataatcgggaaaaataatcccggcgagccctgagaagcggggagctgtctcatataagacgtcaagcgcccgtatgtaatccttcggcagtgtttcatataaagagtctgtgatccggcgcatccgctgttttaacgtcagtccgggccaatcttcctgaaacatcagcgcccggcacttgccccgctcaaaagccggatacgccgatttgattctgttcagaagtgcttctgcaaattcttcgttataaatatcttttaatagagacatgacagtcaccgctttttttcttttattatatgagaatgtatgttcccttgcaactttatcatacattcagcatagatatttcctctgatttttttagttaaaaaaacccttgttttttaacaatataattgagataataactctgaaagcgcctacacttacagatgatctaaggatacggtcgcctatactgcctggtatgttaaggggtagcaacagagagtaagtgaaacgagcgcatcaacggtcaaataaggggttcctgatatatttcgtaaatagaaatacacattggggagaaggcagcaaatcgatcgtatcccaacaaaacgacagttcaaagtctgcttgaggcaggcttttttgctgcggagaaaaggttgttctaaacaaagagacagggtcatatcctaatgacaagtacagtcatcaaggagggggacttctctgtgtcaaaacaaatgctggcgttaaatatagacggagcgcttcttcgctccaacggcaaacttcatcagacgacaaaggatgccatcgaatacgtcaagaaaaaaggaatttacgtcacactggtcacaaaccgccattttcgctccgctcaaaaagtggcgaaaatattaaagctgaatgcaaaattgattacccacagcggcgcatacatttctgaaaaaatagatgagccgttttttgaaaagaaaatatcagaagatcacacgtttaatatcgttcaggtgctggaaagctatccatgtaatatccggcttcttcacgaaaaatattcgatcggaaacaagaagaaagtgaactccaatctggtcgggaaaacgatgattcatccgtctgacccgattttttatccggtgcagtttgtcgaatcattaagtgacctgctcctggatgagccggtttcagcgcccgtcattgaagtgcatgccgaagatggcctgcaggctgatataacggatacgataatgaaagcattcccggccgtcgatgtgatccgcgtcaacggagaaaaactgaacatcgtgcctaaaggggtttcaaaagaaagcggactttcgatggtcgccgctgaactcgggctttcaatggaagaggttgtagctatcggccatcaggaagatgatctgccgatgatcgagctggccggtctcggcgtcgcgatgggaaatgcctcaaatgaattaaaaagaaaagcggactgggtgacaaggtcaaatgatgaacagggagtcgcctatatgattaaggaatatttccgcatgcagcaccgcaaaggctttctcgataagttccatatgaaacggccgtaatcaagagccgcagacgcgaaacgccggtctgcggctttttcgcggattgattttagcctgttctttctgtacactaaagaaagttttgaatctgaaaaataaggtgatcacattgcaaataaaaatagacggcatcacggatgacaggctgcatcgtccgctgcaaaacatcgcgaatttattttttgaagagtgtgttcttgcatacggcgaaacggaggaaccctctgatctcgtcatctcacttgccatttctcaagatgcagacagcgtgtcggtatccggagaaatcaaaggaaccggcgaaaaggaacatcatacgaaaccgcttcttgccggatggagcgaaaaagaagtatttaaacaggtgaaaaatacgctgtcatatgtctacttaaatcttcttcaatcgcatacgggcatgacacaaaaatggggaatcttaaccggcatcaggcctactaaacttcttcataaaaagctgcaaagcggcctcacaaaagaagaggcgcatgccgatctgaaaaaagattatctgatccatgatgaaaaaatcaatctgatgcaggagattgtcgaccgccagctcgctgcggttcccgatctgtaccgggtcaaagatgaagtcagcatttatatcggcattccgttctgcccgacgaagtgcgcctactgcacgtttccggcttatgccattcaaggacaggcgggaagagtcggctcctttttatgggggcttcactatgaaatgcagaaaatcggagaatggctgaagcggcatgatatcaaagtgacgaccatttatttcggcggcggcacgccgacaagcattaccgctgaggaaatggatcttttatatgaagaaatggtccgctcttttccggatgtcgcgaatatcagggagattaccgttgaagcgggccgtcccgacacgattacggaggagaagcttgccgttttaaataagtataagattgacagaatcagcatcaacccgcaatcttatgaaaacgaaacgcttaaggccatcggcagacaccatacagttgaagaaaccatcgaaaaataccatctttcccgcaaacacggcatgaataatatcaacatggacctgatcatcggcctgccgggagaagggacggctgagttcaggcacagtcttgaggaaacggaaaagctgatgcctgaatctttgaccgttcatacgctttcttttaaacgggcgtcagaaatgacgagaaacaagcataagtataaagttgccgacagacaggaagtgtcccgcatgatggatgacgccgtccgctggacaaaagagcacggctatacgccgtactacttgtaccggcagaaaaacattctcggaaaccttgaaaatgtcggctactccttccctggtcaggaaagcatctacaacattatgattatggaagaagtgcagacgattatcggtatcggctgcggcgcggcaagcaaattcattcatccggaaaccggaaaaatcacgcacttcgccaatccgaaagatccgaaatcatataatgaccgattcgagcattatacagaagagaaaatcaaatacttagatgagatgttcgtcaaatccgcattataatatcaaaaacggcacggaatcagcgtgccgttttttttatgtttaaccgtctgtaaaaacgggaaaagaccatcagactgttattcgtaagaggtgcataatatgtatgatgtcattggagcgggaatcgggccgtttaatttagggcttgccgcattgttagaggatatacccggaacagatgctctttttttcgataaaaagaaagaatttgcgtggcatcccggtctattaattaaagggacggatttacaggtggcgtttctggcggacctggtcacgctcgccgatccgaaaagccgctacacgtttttaaactttctccatgaacatgaccggctgtaccggttttatacgtttaatgaatttgatattccgagacgggaatttaacgactatttgagctgggcggcttcagaaatcaaatcatgccgtttcggctcagaggtaatcgatgtgaaaaatgccggcggacattatgacgtcagcgtcaagaacattgaggacggaagcatcagtgtctatcaaacgaagcatttcgtcatggggacggggtctgaaccgcttattcccgcagagattgctgacgaagcgcgtcaggacacgatggtcagcacggaatatttgtttcggaaagacgagctcgccggcgccgaatcaattacagtggtcggctccggacagagcgccgcggagatcttttctgacttattgcacgatgaacaataccgccgcagccggctgcaatgggtgacacgctccgccggattccgagaattggaaaccgccaagctcgggcaggaaatgtttacacctgattatgtggaatattttaaccgcctgccttttaaagaacggctgagcacgctccctgagctggacggactgcgccacggcattgattctgacacacttgccgccatttacgatgccctgtatcacagatcgatcagcggaggttcgcctgacgtgtatattcagccgatggcggagcttgaaaaaattgaaaagcaaaacgggcgctgtgtactgagctttcatcaatggcagatggatgaaacctttacggccgattcagaaaaagtgatattggcgaccggttttaaacctcatattccggaatggtttacggcaattgcccccgatatcgaatgggaggatgagaaacggtttaaagtgacggcagattcccgtcttgtctttaaggacgacaggcggcatcattttttcacattaacgaatcttgatcatgctcacggaacgggcgctacgaatttgaagctgtctgtttacagaaaccaaaaaatcatcaataccattctgggaaaagagcatttctccattaataaaaaaacggcttttcagcaatttcttcccgctcaaaaaaactgaccccttatgaagaggtcagttttttttatgatttctgcggcttcttttcaggcgtcttccatttgaacacgctgttcaacaggagatatatccgcttcgattctttcgtgagcaaagggccgaagatggccagtatcaaaacatataaggcggcgaaaggtttaagtgaagcggacaggccgccggcgatgccgagatttgcgacgataatggagaattcgccgcgtgacacaatggtcagcccgatattagacgatgctttatgagaaagccccgcccggcgcccggcgatcatgccggcgataaagtttccggcaatcgtcagcagaacggcgccaagggcaagccataccgcatctccgagtgaaaacggatcaatgctgagaccaaagctgaagaaaaacatggccccgaaaaagtcacggaacggcacgacaagatgctcaatcctgtcagaatgggccgtctccgaaaatacgagtccgagcaagagcgcgccgatcgcttcagcgacatgaatcgtttcggaaaagccggcaatgaaaaagagtgcggcgaaaatgacgatgacaaatacctcgtttgaacggatatcaagcagcttgttcagcagaggcggcaatttccgagcggcaatgaaaaacagcagcatatatccgaaagcgatcacgattgacatcagcgcgcctccgacagacgtcgcgtctcccagaacaagcccggaaacgacggataagtaaaccgccagaaagatatcctcaaacataatgatgccgagaatcagctccgtttccggattggccgtgcgctttaagtcgacaagcacctttgcgacaatggcgcttgatgatatcgtgatgacgcccgccaatacaagcacttccaaaaaggaaaagcccgtgataaagccgtagatcagccctaaactgaaattaatcagaatataaatcgttccgccggcggcgattgaacgtccggatttgactaattttccgaccgagaattcaagcccgaggtaaaagaggaggaacaggacgcccatccgtccgaaaaattcaatcacttcccggctttcgataaacgtcaggtcaatgatgcccgcttggggcgcgtgcggcccgacgagcattcctaaaatgatcaggaaggggatgatcgagaatttaattttattggcgatgacactcgcaatggccacaagaactaacgctgtaccgacttcaaatacgagatggtccataaacagatcacactccgtctctggagaggaagtcttgggtcagtttcttcagatgctttctttcacctgagaggacgagtgtatcgtttgcttcaaggagcgaatcagcgcccgggtttaaaagctttttctggttatgcttaatgatggcgatgaccgtcacgtcatagttctgacgcacatccagttcgccgagcgtccgccctgccgcctttgcccctttttcaactttaaaccattcgataatcagatcgttgaacgccatttcaatcgattcaagcgcctgcggtttgtacaccatcccgccgataatcgcggcaatctgtcttgcttccgcatcatcaagtgaaatgcttgccagaagctcatcagggtcgcggtcatcaaatctgtaaatttcccgcctgccgtcatcatgaatgatgatcgtcattttttcatgatttctcgtttcgatttcgaattttttcccgataccgggcagatcgttttctttaatattcataaaaaatccctccggaatatactgtttttacaccgtaaatacagacttggcttttagaaatgatcttgatgccggaggtaatttgactggtattgtatcggaatggcgcatgtcctttccattgtggaatcaatgaattgatcaagaggtttgacagataacagggagatcatccgggataacgcaccgtatccttttgacaggccttgcggagcggttttggtgtgaaccggcgtctttgccgaatccgtttcctgcgggtaaaccgaaatttgtacatggctgtctgtttctgtcaccaattgggaaggaagagcgacatccgaagggggggacagcaccataaaaaagctcagtaacaagctgagtatcacatatttcattatcggcgttttcccccttttgttttgtatatcaatttcactatataaaaatgtatgttcagtttcaaatgatatgcatttttcggtatctgttgaccttgaaaaataaaggaatttcgcttcggcggaaggaatatatcatttgaacaaaatatgtaagcggattcaaggaggatgtaaacatgcagtatattcgctatgaagaaaagggaaagattgcggagattgtgctgaaccggcctgacagttacaacgcgctgaatgaacaaatgctccgggaattggaaaacgcatgcgtgatggcagccgacagtgaggcgcttatcgtgcttttacggggggaaggccggggattttccgcgggcggtgatattcagatgatgacgtcggatcatgattcaggagaatatgaacggctcatgaaaatgatcgaatccattacactgacgctctatgatatgaaaaaaattgtgatagccgccatccacggagctgcggcggggctcgggctgagtttcgcgctgtgcgccgatgtggtgctcgctgaagaaaacgcccgcctcgcgatgaatttcatcggcatcggattggttcccgatggaggaggccattatttattaatgagacgcgtcggtgagatcgaagcgaaaaaactgatttggagcggtgaaaaattgccggctgaaaaagcggtgcggctcaagcttgccgacgggctgttcagcggcggccctgcggagggggcacaaccgtatatcgaccgattgctacatgcgccgctgtcagcgatgattgaaacgaaggctatttatcagagcctccatatcagccggttaaaagatgttttgtctcttgaacgaaaggcccaggaaaatatgagaaaaacggatgatcataaagagggcatccgcgcctttttagaaaaacggacgccgcaatttaaccggtaacatacagaagccggaaagcttctgttatctgtggaataaaatcagctttccggcttcatttaccaagcgatgagtactgttctcaagctttttttcctttaacaaagcctctccggcggccttcgcctccgcctcattatccgcttcgatccgttcattcagcagcgtttctcccgacgcatggaatgcggtcaatacatattgtcccatcatgtcaccccctttatagaatgatattctgataaagaatttaaaatcctccattaatttttacccattattagtatataatgggtcaaggaaggagttggattcgtgcttacaattgaaaacgtaacgaaaacattcggcagctttaccgctgttgacaatttgaacctgcaaatacctgaaagggaaatgttcgggctgctcggcgcaaacggcgcgggaaaaacgacgacctttcggatgattttaggtcttttaagcctgactgacgggcatatcacctggaaagggcagccggtcaattattccatcagtgaaaaaatcggctatctcccggaagagcgggggctgtatccgaaagtgaaggtgagtgaccagcttgtctatctggcgagattaaaaggaatgggcaaaaaagaggcggaaaaagagctcatgacatggctcgagcggttcggcattacagattacaagaataagaaagtcgaagagctgtcgaaaggaaaccagcagaaaatccagttcatttcggccgtcctgcataagcctgaactgctgattctcgatgaacctttcagcggtcttgatccggtgaatgtcgagctgctgaaagaagcggttatttctttgaaaaacagcggcgtttccatcgttttttcaagccaccgaatggagcatgtggaagagctttgcgagaatttgtgcattctccagaagggaaaacccgtcgttcaaggcaatctgaaagacattaagcggtctttcggcaaaaaaaatgtcaccgttcattcagatgatgacctcagctttttaaaaacgcatgaaggcgtcgtgaaatggaaggaaacaaatgacgggatcagactgcaggtcgcgaatgaaccggtttctcaggatattttccaggcgctgcaagggaaaggttttatacggaagttcgaattggaagagccgtcactgcatgatatttttatagaaaaggtgggggccgtatatgaataaattttggattatgctgtttcatacatataaaaacaaaatcgcgacaaagtcattcattatttcgacggccattaccgttttattagtattagcggtgaccaacctgcaatcgattatatccgtgtttcaatcggatgacggcaagcagcaaattgcggtgattgatgaaacgggcgggctgtacccggcgtttgcaaaacagcttaaagcggcggatacagacaatgatctgcaggcaatggagacgaaggagtccgaaaaagatgccgtaaagcgtgtcaaagacggtgaatgggacggactgtttatcatcagacaagatcaaaaaggaacgataacaggagcatacaaggcgctgaccatttccgatgaatcagcatataaactgctcaagcaggctttaacccagacaaaaaccgctgttgaaaccgccaagctcggcatttcggcagaaaaagtcagcagcctctacactccgccggaagtcagcaaagacgcgctggaaaaaggggcgaaatctgaggaagagctcggtcaggtaatggggcttgtatacatcatgctgtttgtcatctacttctcagttatcatgtacgcaagcatgattgcgatggaagtggcgacggaaaaatcgtcccgcgtcatggaaattttaatttcaagcatgccgccgattcagcagatgtttgccaaactgttcggtatcgcgctcgtggggatcacacagtttgcggtgctgattgcggctggttatctctcactgaagctgaaccctcaaaatgatgcgtcgtcgccgatcagtgcatttctcaattttacggatgttcccgtctcgacgatagtctatgctgtcattttctatttgctcggctattttctttacgcgacgcttgccgcgtttctcggcagtgttgtcagccggatagaggacgtacagcagacgattcagccgatggtttttttagtcgtggcaggttttatgatcgccatgttcggcatcggcaatcctgacgccggttttattaccgttacatcttacattccgtttttcacgccgatgattatgtttttacgcgtcgggatgctcgatatcccgttttggcaggctgcggccggaatcgccctgacactggtcactatcgtgatctttgcagcggtcggcgcgaaaatttacaaaggcggcgttttgatttacggaaacgccagcggattcaaagcgatcaaacaagcgctgcgcatctccaaaaaataagtgaaacagcccggaacagccgggctgtttttttattttacagaacgtgcattcgtataaaaacggtgctaaaataagggtaattcaatttgcagaaaggggagggcgagatggctgatctgacgtttattcatgccgctgacctgcatctggacagcccgttttacggcatttcgaatctgcctgaaccggtatatgcgcgtattaaagaaagcacatttcacagcgtccgccgactgacggacggggcactccgggagcaggcagatttcgtgctgctttcgggggatctgtttgacgaagccaacagaagtttaaaagcccagctgtttttgagaaaacagtttacgagattacaggaagcggatatccaagtgttcgtcatattcggcaaccatgatcatttgggcggtaagtggacgccgattgaatggcctgaaaatgtacatacattcacctcggatacaccggaggaaaaatctttctttaaaaacggagagcttgcggcaagcatatacggatgcagctatcaggaaagaagcgtaacggtcaatcaggcggcccgttaccggaaaatgaccggcgcgccttatcatatcggcatgctccacggcatgttatcaggagcggaagggcatgacccgtacagcccgtttacgaaagaagaccttgaaaaaagcggcatggattactgggcgctcggacacattcataaacggcaggttctgtccgcccggcatcccgccgccatttacccggggaatattcaagcccggcatttaaaagaaaccgggcctaagggatattatctcgtccgggcggcaaacggtgagatgtcttgggaattcaaagaagcgcatgatgtgttatgggaggaaattgatcttgatatctccggagctgaacatatgacttcacttctgaaagccgcatcggatacattctccggcttgcgcgcggcgggccgcccggcatgtgtcaggctggtgcttcgcggcgcggcgccccgcttttggacggaggcgcccgcaggcatcgcggaggagcttctttccgctttacaggaggaagaggccgaagaggaatgtttcgtctggccgcttgcgcttgaggatcggacggatgaaacagacaccgtgccgcccgatccgttttttaaagggctccttcaggacatagaacaatgcgcggacatgagcggtgtgtttgaagcccttgagcgtcatcccgtataccggcgtcagatggcttcatttacagatgaagagatactggatattaagcggcaggctcaagccgttttaagacgccagatgaaggagcttcagcgatgaaaataacggcgatgcatatttaccaatacggaaaattttcagaccgaagttttcagctgtcagattctcccgtgcaagtgatctacgggttaaatgaagcgggcaaaacgacattgatgtcctttatcaaaagcgtactgttcggttttccgaaatcaaaaaaatacgaaccgaaaaacggcggggtttacggcggcactgtggaattgaagcatggcgatcacggcgctgtcaaaatcgaacggacaaaaggcgctgccgaaaaagtcagagtgtatacggcttcaggcgaaatcaaggacggagaatggctcaaacagcttctttccgatacagatcgggcgctgtacgaagcgatctattcgttcgatgtattcggactgcaggagattcaagcttttaaccgggacaaaatcggcgagtttctcctgtattcgagcttattcgggtcggaagcggcggcaaagcttgacgggcggctggcaaaagaacttgacaggatgtataagccgaacgggcggaacccccgcttaaatcaggagttggatacattaaagcggctcagcgcccagctgaaacaggcggaagctgcggaagcgggctatcacagccttctggaagagaaaaaaagcgccggcggccgtttgcaggatgccgaagcacgattgaaagacataactgaagaaatcaaaacagtaaaatcggcgatagaagcaaagccgctcgcagacaaaaaaacagccttggaaagcgaactttcttcttatccggaagcattgaagcaattcccgaaggatggaatgcatcagcttgaaaaatacgaatcgcatctccatccgaaagcggcccgtcttgaggggcttcgggcaaaagcggctgaactcaggcggcaggctgatctgctcgctccaaatgaggacttgctgcaaaaagagcggcagctgcaggagctttccggcgagcagcatatgtatgaatcgcgcggcgaacagcttgcagccatccaatcacagatccggcagacatctgcccgcgttttgtcaggattgcagcagctcggaagacatgaggaagacggcattctttcactgaacaccgattatgaatatgaatggcggctgcaggaagccgtgcagagcgccggacaggcaagagaaagaaagacacagcttgatgcgattttcgaacaagcgcggctggagctggaagaagccgaacgaaaacatgccttgacggcggaaaacattttggaccccgctgtcaggaaagaaaaagaagccgctttacaatcatataagcaaacggctgatacagaaggaaacgaatggcaggcacatgttcagcagctggaaaaacagcgcgccaaacaaaaaaagctctttctcggtgcgggcattctgttcattgcgattttcgctatgttaaaggaatggctgcccgccgccctttttaccggtgctctgctgctgtatatgctgtccggcatgcaaaaaccgctgccgtcagaaagaggagggcccggacacaagaaaaagaagccggcgatctctaaagaagcggctgatcttctgcaggaagagctttggcgtgacggccggcaccggcagcagctgattgcggatcaagccgtgcttgaacagaaagaagcggcatatgaaagagtcatccgccaatatgaagaatgggaggcggaaatggcgccgtctgaaaaacaggcggaactttttatgaaggaactggggttttcaggaagtccttcccatcttcttgacgcatatcatgtaatgaaagatgtcaaaaaagaaatccttaacaagcatgagctgaccattgaagcgggccggctgcaaaagctgcaaagagcatttgaggaccgggtcaaaaagctgagtccttcagacggaagggagctgtccgtaagagaaagactgcacgttttgctggcgcaggcggaacgggcccgtgaggaagcaaaacgaaagcaggcgctcgaaacggatctgctgcatgcacaagagcaaatgcgtgaattaaacgaagaagttcattactacgaacagcaggtcaaacagcttttcatggcggcaggcgcaaaaaaccgcgaacacttttgtgaactcgccaggctgaatgaaagccgccgggaaacagagcggcagctgcgcgaaatcaaaacgcacttgtccggcataggcggaaaacagctggagccgtacatgagccgcacagtgtccgaacttgaacatacagtcgttcagaaggaaacagagaaaaaaacgcttgaggaaaaaagcgcccagctccgtgagcaaaccgctttattaacggtgaagcaagagcagctggagtcctcggggcttgtatccgatttaaaacagcagacagaaatgcagaaggagcgcgtgaaaaaaaccgctaaagagtgggccgcattacagacggtcagacacattatcagggaaaaaatggagcggcataaaaaagtgacgcttccccgtctgttagaaaccgccggtgcattatacggaccgcttacggacggacgctatcacaaattgtatttttccgaggctgatgattccattatggtcatgcggaaagacggaacggtgttttctgcaggcgaactctcacaggcggcatgcgagcagctttatgcggcgattcgttttgcccttgcgtcagagagggaatctgcggtatcactgccgtttttacttgatgacagttttgtccattttgacaggcagcggctgcagcggctgtttgatgtgctgaatcagctttcagaaggcgggcggcagatactttattttacctgccatgagcatgtcagccggtcttttcacagcggacaagtcatgcggctcctgtcataaaagagtttattttcaaaaaagaggtatgtgctatactggtattatgtaagatatggagggagcttttaatagaatggcaaaaggtattatgctgcacgaggtcggcgagcaggtcgatcaatactttctgattaaatcttcgactaagggaatcgcaagcaacggaaaaccattcctgacgttaatgctgcaggaccaatcgggagatatcgaagcgaagctgtgggatgccaagccgactgatgaagtaacgtacgcggcgcagacgatcgtgaaggtgattggagatgtccatcactatcgcggacgaaaccagcttaagctgagaaacatccggccggccggcgagaacgaaaatgtcagcattgatgattttctggaaacggcgccgattccgaaaaacgaaatgatggaaaccgtcactcaatacatttttgaaatgaaaaatccaaacatccagcggatcacgagacatctggtcaaaaaatatgcggctgagtttatggattatccggcggcggctaaaaaccaccatgagttcgtttcagggcttgcgtatcatgtagtgtccatgctgaacctggcaaaagcgatagccgatctgtatccgtctcttgaccgggatttactgtatgccggagtcattctgcatgatctcggcaaagtaaaagagctttcaggccccgtctccacaacgtacaccgtggaagggaatctgctcggacacatttcgatcatggtgacagagctttcaaaagcagccgaagagcttcagattgacgctgaagaagtgctgattctgaagcatttgattttaagccatcacggaaaagcggaatggggaagcccgaaaccgccgatggtgaaggaagcggaaattcttcactacattgacaatctggatgcaaaaatgatcatgatggacagagcgctggaacgggtgaagccgggcgaatacacagagcgtgtatttgcgcttgaaaaccgttctttctacaaaccgactttccatcaataagataaaaaggccgattctctatgatcggtcttttttacgttcagctctcataacttgtctttatcaagcatagcttagaataaagactctgggtgaaaaagggaggaaaccgacgtgctattttttccttggtgggtatacctttgcattatcggaattattttcagcgcctataagcttttcacaacagctaaagaagaggaaaagcttgaccagtcgtttattgaaaaagaaggaagggtgtatattgaacggatggaacaggaacgcgagcgccgtatggcggcgcccccaagtgaaaacgcggatgcggaagaaaactccaatcattccatcgcataaaaaaactgtgcggctcaccgagagcccgcacagtttttttatttagattgagaagatgatgatgttgaagtgttaaacgtgtcttttaagtctttgtcttccacttttacgtcagcttttttcatgactttttgaattgccgcctgtacagctgagttgtcgtttaatttctgtttaagaacttcttctttcagttcttttttcatgtcatcatatttgccgcgttcttctgtctttttgatgatatgataaccgaatttggttttgaccggatcgctgacttgtccgactttcaggccaaatgcagctttgctgaatgtttcatccattgactttttatcgaaccagccaaggtcgccgccgctgtcttttgatgtgtcagttgagtattctttcgcaagcgtttcaaacttctcgccttttttcagctttttctccacttcgtcagctgtctttttgtcagcgacaaggatgtggctcgcgcggattttaccttttaagccgtcgtaatattctttcgtatcggagtcagatactttaatgttgtctttcgccgctttttgtgcaagcagttcgtactttacctgatctttcaggtaatcttcgccgtactgctgtttaagggcgctgtactgatcaccgagctgcgttttgtactctttcagcttggtatcgatttctttatccgatactttgtatttttttgctaatactttttcttgtacgagctgtgtcagcacacttgcgcccgcggtttttttcatgttcgtgtagagctcgccttttgttacatttccggcatccgtcttggcaatcacgtcgttgtcgccgctgctgcaagcgctgagagccaggacgctcgttgccgtaatagctgctatcgcgattttcttcattccattaaacactcctaatcatccaaattaaattgcatatgcgtatcataacatattgtggctttctgtaaaaagattttaaataaagggcattcgtctagtcaaactttttcctgatacatacaaatatattgatcatgaaaaggaggtaatgaaccatgggcggaggatattcaaacggtttcgcactgctcgtagtactgttcatattgcttatcatcgtaggtgcagcttacatttgttaagcgaaacggatcgctttttccaaaagcggtccgttttcttacccgggcgcctaatcgtttcagaagtaaattgcatatgatgtaattggaaaaataaaacgttttgtaggaggtgcttttggagatgggtgaagtatttgcaggcggttttgcattattggttgttctgttcatcttattgatcatcatcggcgcttcttggctttattaagaaaaaaatatggctgtcgggggtcagacctccgtcagccatatttttttgcctgtttacacagtaaaggagatctcgacgaatgaagagatcagtaaaattaaaatagatacattaataaaacggaataccttatcctgccggtcttcaggaatctctctgacaaggcataatgtatttgtgagcctgtttatgaaataaagaataaacagggcagccacgataaaatagaataaaatgatgggagattccccctctctctgaactgctcccatattacattaccaaatatttattaaaaaagatagaatgtaacctgaaaaatcagcgggacatcaagactccggcactttttttactaaaatatcaaaaccgtcggattcctggtcaatcagacatgatttgggcgctttgaccagatggagcgcaaacagaagatcaggcaggcagtaccccgcatggatgctcgaaatcatataaaagtaatgagcgtgtctcggaaatgccagtccggcataaaacaataacggcgtaatgaataaaaacgggctgatcgttgaaatcagcatcgtcgttttcggtatgcctttccatgtcggcatccgcaagaagtacattttcatttccttttttctttttttacagatcatcggcaggacatgtatgactttatgtacaaataaagtaacaacgagcagcacacaaaaagcaaacacgtgcccgtcacttaaactgatattcggacgcagcagcccgaatgccaagaagttgcatataaaaaacaggatcataaaacctacagcagtcaataataaacgaaccgcaccataatctttgatcagattaatggttttccagcaattcatcagagtcatccttccgtacaaagatggaatacaatctcaaaataatttactctcttcaggagaaaaaatcaatccttttttaaagaaaaaaataaacctggaaagagaagaacagaagagctcggtgaaacatggaaatgtacggtttaacctttcttctccattcattatcagctaaaataagattaaagatagaaagaagtgaaacggatggattcaatggatcagcgtatcgggcgtttagaatattacatacaattgctggtgaaaacggtggatatggataagtaccctttttatgcgatgatgattgaaaaagggctgaccgaagaagaaggagaagaggtcgggcggatctgccgcgaattggaggacgagctggagtcgcaaaaagcgcaaggctttgtgacgtttgacaagctccttgcgctttttgcgggacagctgaacgaaaaattagatgttcatgaaacgatttttgctctgtatgagcaggggctttatacagcgctgatggaagaatttattgagattatgaagcactttgattaactgttgatcggttccagctcttcagccgtttcatggacagccgattcgtccgtttttttcttcagccttccgtcttcactatcaaaatcattgtttatgtttgtcaatgatttctcgaatatctccataaaatcttcgccgtaaatgtggcggatgacacaggttaattcttcaacctcaggaaacttcccgaataagtggtagatcggctgtgagcctttaaacacagcgtttctcgacggatcaaactcctcaagcaggctttcgaatacattttccccttcttctgttaactgaatgtacgtgttccgtttatcattcagccgcttggaaaatttcagatatccccgttcttcaagcttttttgaaaagttaaatgcagttgatacgtgcataacgccgaatttggcgatttctgaaatagaagctcctttaagctgataggcaatccataatatatgatgctcattaatattaaggtcgtacggcttcagccaattctgccagtctttctcgatagatttccagagcgctttggacagctgcgccattttttgggtatagattaaagcttcttttagatcgtaaggcggttcaacacgattcaatacagatcacctgcttcacattttcttttcctctattatgccaataaaataaagattaataaagatgaaaatttaagaattttataataaattcttgatccgttgctgggaaaggctttaaaccgcaaaaaaaagtgcggaacgcaatatgtccgcacttttttttggttgtataggatattagttttgtaaggttttctccagctgtctgattttctcttcgatatcagcgatttccttttggagatcctgttggtgcggcttgatttcctcctgccaccttttaatgttggtctgaagctctccgcctacgtctttaatgacttctgcgctttctttcgccgtttggacaagctggtccttaagcgccattccgtctttttttaaccgtttgattgtgtcctcaattgaattgcaattcgctttgattttgccccgcagctcttttccggatgaaggagccgagagtaacaccgctgcgcctccgatcaatccgcctacgaaaaggcctgttaaaagggaacgtccgtcagccatttgaaatcaccccgttttttttctcataacttttatcatttttgttcagaagaataaacttctatacatagcttgctttattttagcatattttttaagggaaaaggagggagaaggttgtctgtctttatgattgttttatcttgtatggctcttgtctttgcggcgggcgccgtttattacctgaaactgctcggccaggccgcttcttatccgccgaagcgggtcgtccgccaaaaggccatcgtctgctcagcaggaaccgccctcgcattgttccttatttttttcacaaaacttctcgtataaaacatgctgaaacacattaaaaaacctcttccggccggaagaggtttcggtatgcggttatttcaccgtttcaatcatattggaccgttttaagatcgtctgcacaatcggatgcataatgataatggcgatcgtattcagcgcagccgccggaaggacgaccgcgagcaccaatgcggtgaatccgcccggcaggccgacaatcagaagggccagcgccaaaaagagcaaaccggagatgaaggtgccggctatcgtaatgacggcggcgggcgctgttttcacgctctttttcaccaaaagcgccagcgcgagaaacagaaacgccgttaccggtttttcaatgatattcggaagctgtccgcccggaaaagatgtcgtaagtgcggaaatgattcctgttacaatcccgatcatcagcacgttctgcacacgggggaataacagaatacccataaacatcatcacaagcatcatatcgggtttcattccgaataataccggcggcataatggaatgaagcaccgctccgattgccgcaaacagggccataatgactaattcttttgttttcatactaagctctcctctgctaagctttttcgccatccaataatatgctcgtcatttattgcgatggccggaaaaattgatatgcaaacagtatatcaaaggaaccgttatgttagaagaaatttattcgttttcctgctggaactttctcataaactgagccagtttttcacaatcagccaggctgacggcgttgtagatagacgccctgcagcctccgactgagcggtggcctccgagtccggtcattttagccgctttcgcttcttcaacgaattttttcgtgagactgctgtcgcggagggtgaacgtgacgttcatgtgagaacggctgtcttttgcggcatgccccgcgtaaaacccgccgcttgtgtcgattgtgccgtacaggacgtcggccttttcctgattgcgccgttcagccgcttcgacaccgccgttttcagccagccattcaaggacgaggctcagcatataaatcgcaaatgtaggcggcgtattatacagtgaatcggcttttgtgtgagtggagtatttcaacattttagggacgttggcgttttcgttttcaagccatgattttttcatgatgacgaccgtgacgccggacggcccgaggtttttctgggctccgccatagatgacatcaaacgttttgacatcaatttttctgctcaggatgtcgcttgacatgtcggctacgagcgggatcggtgaattcgggaactctttccactgcgttccgaaaatcgtgttgtttgacgtaatatgcaggtaggcgccgtctttgattcctgagaggtccgcttccggtatgtggttgtggtttgaatctgcgcttgttgccgtgacggatgtgtttccgaacagtttcgcctcggcgagtgctttttcagaccatgcgcccgttacgatgaagtgcgccgttttttccggtgttaaaaagttcatcggcagcatggagaattgaaggcttgcgccgccttgaagaaataaaatatcataatcgtcgggaatatccatcagttctttcagaaggctttttgctttttggtgcaccgcatcatattccgtgctccggtgggacagctccatgacggacatgccggtatcattgaagttgacaaattctttttgtgctttttgcagcacatccagtggaagggctgcgggtcctgcattgaaattcgttgtacgttccatgtttacgatctctccctgttttccgctttagtgtaagaaataatacaattatcctatcacaattttttgatttttttgatataaaaaaatataatttatgttttttgtgttttcggacgcaaaaaaacctcatctttaagatgaggcaagccgttttctgacggttgaagcgatctcctgaagatcgtcaggcgtatagtcttcggcgtgggtcttccagacagccccgaaaccgtcgccttttccgtaacgcggaatgatatgcatgtgaaaatggaacaccgattggcccgctttttcaccgttgttattgagaatattcagcccgatcggctcgaattcatcgcggatggcgcgtgcgattttcggcaccgcttcaaaatattctttagaaagctcaggcgtaaactcgtacacgttttcgatatgtgttttcggaatcacgagcgtatggccttttgtgacctggctgatatcaagaaacgccacgacgtgttcattttcgtatacttttgaagacggaatgtcaccggcaatgattttgcagaaaatacaatcgtccgctttgtgcatagatgggtttcctccctgaaaagaaatatatgtatattctcatcgtaccacaaaaacggccaaaacaaaaaacaggatgaacggctgcgcgttcaccctgatgcagaagtacgagctttatcacagaaaattgaatatgccttttttaagcacctcatttgtttttaaaatgaagacttatgggtctgcttaatcattcctgggacaaacacctcatttgattatttcatcatgaatgaagaacatcatcaaagcagtgtgtgaagaaattgtaagcacaggacatgttgattttcatccaactgttctaagacgtcttttataaacacctcattttcagttgattaaagctgtttccttctacatacattatgatgtccgccaaaacgataactatgcacacttttcacgtgagaaaaacagggaatcgtttcaaatcagactttatttttggtactatgaagaaaaacgaatcagaaggggagaaattatgtctctgctatcggtaaaagacttaaccggcggttatacgagaaacccggtcttaaaaaatgtttcattcacccttgagccgaaccagattgtcggactcatcggattaaacggcgcgggcaaaagcacgacgatccggcatattatcggattaatggacccgcataaaggctcgatcgagctgaacggcaagacgttttctgaggataaggaaagctaccgctcccaatttacgtacatccccgaaacgccggtgctgtatgaagaactgacgctcaaagagcatttggagctgacggccatggcgtacggcctttccaaagaaacgcttgaaaaaaggcttcctccgcttctgaaagaattcagaatggaaaaaaggctgaaatggtttcccgctcacttttccaaagggatgaagcagaaagtcatgatcatgtgcgcgtttctcgcggagccttcgctttatatcattgacgagccgtttctcggccttgacccgcttgcgatcaatgcattgctggagcggatggacgccgcgaaaaaagccggatcaagcgtgctgatgtcaacgcatatcctggctacggcagagcgctactgtgacgctttcattattttacataacggcgaagtgcgggcaagcggcacactggaagaactgagagagcagttcggcatgaaagacgcagctcttgatgacttgtatatcgaactgacgaaggaagacgccggccatgaataatatgtctactatttggcagtcccggcttgaagagcatataaaggaaaccagaatgtatatgaaatatatgctcaatgatcatctcgtcattgtgctgatcttttttattgccggcgcggcaagctggtacagcaagtgggtcaaagacattcccgttcattttccgtcattttgggtgatggcggtgctcttttcatttgtgctgaccggttcatacgtccggacgctgctaaaggaagcggaccttgtgtttctgctgccgcttgaaccgaaaatggggacatactttaagcatgcatttaagtacagctatctgtcacagctgtttccgctaattgctctgtcgcttgtatgcatgcccctgtttttcgctgtaagtccgggggcgtcgcttgcgtcgtatgccgccgtatttattcagatgctggcggtaaaagcgtggaatcaggccatggagtggcggatgacgtttatgaatgacagaagcatgaaaatgatggatgcggtcatacgctttatctgcaatatgctgcttttatacttcgtcttacagtcgttttatgtgtacgctgccgccgtctacattgtgatggccggcctttatgtgtatttcacatcggccgcaaaacataaatcattaaaatgggaagcccatattgaatatgaattaagaaggaagcagcggttttacagaatcgccaatctgtttaccgatgtgcctcacctgaaaaaacaggcaaaacggcgggcgtatctcgactttttgctcagaatgattccgttcgaacagcggaaaacgttctcctatatgtatgcgcgggcctttctgcgttcaaatgattatctcggcattcaggtcaggctcacgattatttttatcctgattattatgctcgtttccgccaatccgtggataacggcggctttaaccgtatttaccgtctttattacgggaatacagcttctcccgctgttcgggcattttcatcatctttctctgcaggagctttacccggtcaatcagaaagcgaagctgcaaagtttcttttcgctgatgaaatcggcattaaccgtgcaggcgctgctgttctgtgcagcgtcagcctatgccgcgggagtcagcggggcgctgtatgcggctgttgcttcagccgttctgatttttgtgatcatgccttcgtatatgggcggaagattgaaaaagtacggcaagctgtaatcaatcgggtttttgaaacctcaatgaaagaaggagacacagatgaccgacgatcagcagctgatacaggaagcactgcaatggaaagcgcgttttttacgcaaagattctatgcttgaacgtttttctaaaggaatgcaggcgaaaataaatgagcggattcctgataaaattcatgccgtcatcacagaaagcattaaaaaaatgaccgaagcaacaatggcgggttcaaatctggtgaaaggcaagcgggatacaaacggtatgacgcttgctgaaaaagatgccctcgccagacaaaccatcgcatcgtaccaaaaggtcgcggcagccgaaggtatcggtacgggggccggcggaatttttttagggatggctgattttcctttgctgttatccattaaaatgaaatgtctgttcgatcttgcctctatttacggctatgatgtgaaagacagggatgaacgattgtttttgctgtttatttttcagctggctttctcaagcggtgaacagcggaaacgcatatactcaatgattgaacagtgggattcgaaaaagcatgatgtcgattggagagtttttcagcaggaataccgcgattatctggacgtggtgaaattgtttcagcttttgccggtcgtcggagccgccgtgggcggagcggccaattataaactgctgtcacagctcggtgagacggcaaggcacgtttttcatttaagaatcacagcagccggtacgtaatgtgccggctgttttttatgccctatcgggggtagcttaccgcggcgccgataagcaccttggcggccgtcagcatcgctttctcattaaaatcaaatttcgggtggtgatgaggataaatggtttccgcattttctaaagcggcccccgtaaagaaaaaagcgccttttgtatgctgcaaataataagaaaaatcttctccggccatctgcggctctccttcaacgaccttcgtgacgccgtctgtttccgctgcggctgccgccgcgtgcgctgcttcctcgggatgattaacgacggcgggataaccgcgcttgaaacgatattcataggaagcggagtgcatggaacagattccttttacgacggcttctatttctgcttcgagcaggctgcgcacactttcgtcaaacgagcggacggtgcctgatatgactgcctgatcggcaatcgcattaaacggattttcagcggtgaacgagccggctgagatgacggccggctgcaccggatttacccgccggctgacgatatgctgaagagccgtgacgatttgtgagccgattaaaacggcgtccttcgtatcgtgaggaatcgcgccgtggccgcctttcccgatgactttaatcgtaaagccgtcagcggcggccattactgcgcccgggcggcataagaccgtcccgacgggttcagtcgcccaaaggtgagtgccgaaaatggcatcgacatgtttgaggcagccatcctcaatcattgcttttgctccgccgggagataattcctcggcgtgctggtggatcatcacaaatgaccctttcagtttttcccggttgcagtacagcacttttccgaccgcgagcagagccgccgtatggccgtcatgcccgcaggcgtgcatgacgccgggaatttgtgaagcatagggcacatctttttcatcctgtatcggcaaagcgtcaaaatcagctctgagtgccacggccggtcccggttcactcccttcaatataggctgtgacaccgttgcccccgacattcgtcctgatgggaacgccgagcttttcataaaatgaggcgatgaacgccggtgtttttttctccttaaaggatggctcgggattcatgtgaaggtgacgcctgatttcaaccatttcctcatacagcccgtcaagctgagcgtttaagcttttttgaagtgtcgttaacgtcaaaagcgatgccccctcgtctgcttttcccatgattgtatagaaaatgtcagaagatttcaatccttttgctacgggagaatgatgatggcggcgatcgttgtgacgactagcccggccgcaaccgggataaagttttttctggcaagctcaaacgggtcaactttacaaatagccgcagcggggatcagtgcccaagggaccaatgttccgcctccgacccagatcgctgaaatctggcccagcgccgttaaaacggccgggtccgtatgaagcgcggcggaaaacagctttgccatcgagcctgcaagagatataccggaaaaccctgacccgtcgagcccggtaatcgcaccgactgcggtcagggcgatgccggcgaattctccggacatcggaaaagaatgggacagggccaatccgaggtcattgacgatccccgcagatcctttcggcagcggggtgttcaaaatacttttaaaccccgcgtcaccgagataaaagaaggccgcgatcggaatgacggggccgaatactttaaagccgaattgaaaaccgcagataaaatactcggtgatcttttctaaatgccgctctttatatacaatgaaatgaatgatcaggagaatgccgatcgctgttcctccgacgagtgccgtcgcatcgtttccttgcagacggtatacgatcatgcagataatatcggcgagaaaaacaagcggaatgaaaaccgccaggatcaccctgagttttttcggcagatacatacttgtgtccaaagaaccggagctgtccaaggagaggggggccttcgttttttttcgatcccgcatgatgaggaagaaagcggtgattgtcgtcgttaaccccatgatcaaaacgagcggaatacttgcctgcatgacatcgctcacgggaatgcccgcggcatcggccgttaatttcggggccgcctgaatgacataatcccccgataaagcgaatccgtggccgaacaggttcatcgccatagccgcggcgatcggagaaaggcccgctcggatcgctgcgggaagcagcacagcgccgatcagcgccacccctggtgacggccagaaaaaaagagagatggcaaacatcaggcagccgataacccaatacgcgacagccggccccttcatcacctttgcaaacggagaaatcatcgcttcattaataccggtttcggtcaagaggccgctcatcgccacgataaaacaaatgataaaaatcgtcggcagcaattctccggctgcatacgtgaagctgtgaaacagactgctgaccgaagcggagaatgaatgcgtcgtccatagcgcaatcacaaaaatgccggcgagtgaaataaaggttgtatctttcctgaggagcataaaaacgataatggcagcgataaaagcaacataaagcagatgtaccgagtagacgccgatccccaattgaaccactccgtttataaataggattgctacagattattcataggcgggcggaaggtgcaaagaaggatgcgtaaaatcgggacatcaaaaaagccggagaatctccggcggttttcagtctattgcgtaataagcggttacataagacgggcgggagaaaatagacgttgtgtcgatgccggcagatgttccgcgttttttatgagcttcctgataagagtttgactgctgccagccctgaaaggctttttcctcttcccacagggtcaaaatgacatacgtatcgccttcaagcggtcttaatacgcggatggcttcaaaaccgggttcattttccactttgccggcgcggtttttaaaccggttttcaaacagcggacggccttcctgggtaacggcgatgttgttgaggacggcgtagcccggatttttgatttccccgacgctgtcgatgctttcataggaatggggcgcctgaaaaacggtttctccatttgtttcatgaattaaaaccgcattatcctccccttgcatcagcaccatattctcactcgggtgtttctttgcaatcgtctttaaaaaatcggctgtcccgtatgtaatataaaccttcatatcagccacctcctgcttgctagtatatcaaaagagtggtataagtttctattggcgactcattctgacataattcgaaacaatatttcccatactacaagttaagaaaggcgaggtgacttatgctgaaaaagaaaaaaagattctttattccggctgtaattgcggcggcaaccgcttttctcgcgttaatcggatacattatcattatatttctcggccattatgtcatcgatgaaaagaaattaatactgcacgcatcttcaaaaatcgtcgatcaaaacggtgatgaaatcgcgagcctctatacggaaaatcgcgagccggtatccattcagcaggttccggaagatgtgagagatgcctttatcgccgttgaagataaacggttttacgaacatcacggcattgatgtgaagtctgtcggccgggcggtgttccgggatgttttagcaggcggcaaggtggagggcggaagcacgatcacccagcagctggcgaaaaacatttttctgactcatgataaaacatttttgcgcaagacgaaggaagtcattatcgccatcaatcttgagcgtgattacagcaaggacaagctgcttgaaatgtacctgaaccagctttatttcggccatggcgtttacggcattcaagccgcgtcccactactactttaataaagaagtaaaagatttaaccgttgcggaaggagccgttctggcagcgattccgaaggcgccatctctttattcgccgattcagcatccggataaaaataaagaacgccgcgatacgattcttgcaatgatgaacgaccaaggctatatcagcgccaaggaagccgtcagagcccagggccggacattggggcttcatgtcaagaaaacatcagaaacgccttggtttgacagttatattgatcttgtcatcaaggaggcggaagaccgttattcgatgtcaggtgaacagctgcttcaaggcggttatacgattcggacgtcacttgattccaagctgcagaaaacggcatacaccctcatgaaggaaagcggctattttccggggacggatcaggcggcagagggaagcgccgtctttattgataataaaaccggaggcgtgcgcgcggcagtcggcggacgcgactacgtgacaaaaggatacaacagggttacggcgaagcggcagccgggctcaacgtttaagccgattgccgtatacgggcccgccatgcaggaagacaagttcaaaccgtattcgcttctccaagacaaactgacgtcctacgacgggtatgaaccgaaaaattatgacggacagtacaagggggaagtgacgatgcaggatgcgatcacttacagcataaatgcgcccgctgtctggacattgaagcagatcggcgtagatacgggaaaatcgtatcttgagaaaaacggcatgaacatttctgacaacggactcgcgattgcgcttggcggtctgtcagaaggcgtcaccccgcttcagcttgccggagcttatcatacctttgcggcaaacggaatgtatacgaagccattttttatagagaacatcacggacgaagacggagaaacgttatccgggcctaaaaacggcaaaacgcgcgtcttcagcggacagacggcatggaatatgacgagaatgcttcagcaggtcgtgaaagaaggaaccgcttcacaaggcagctatcaaggtgacctggcggggaaaaccggcacgaccacatttcccggcgtccccggcgcgacaaaggacgcctggtttgcgggatacactcccggactgacgggagccgtctggatgggctatgacaaaacggataaaacccattacctgaaaggcggaagccaatacccggtcagactctttaaagatatcgtcacaaaagcgggggaaaacggccggacattcaaaaagcctgaaaatgtgaaggaactgggcagtccgattgagctggaggcggtaaagtccctgtcggcccgttatacatttaaggcgatgggactgattacggttcaattaaaatgggatattcaaaaggatgatcgggttgtttaccgaatatatgagaagaaagacggaaaagacaaacttctggattcggtgaaaggaaaaggcagctttgacataccgtacgccaatctgttttcaggggcttcatacaaagtcgttccatataattcacagacggatcaagaaggagagggaacggaatacgttcagccgaagcttttttcttcttaatcatgaattcggcgattttttgaacattgagcctcaattctatacgcttttgaaaaaacaaggtatagtgtaatgggcgaagaacacgaacgtatggttgcaggaggaaaggtggaaattcagatgagtaaacgagaagcgtttaatgatacgtttttaaaagcggcacggggagaaaaaacaaatcacgtccctgtctggtacatgagacaggcggggaggtctcagccggaataccgcaagctgaaggaaaagtacggcttagtcgaaattacgcatcagcccgagctgtgcgcgtatgtgacgaggcttccggtcgagcagtacggagtggacgctgccattttatataaagacattatgacgccgcttccttatatcggagtggatgttgaaataaaaaacggaatcggcccggtgatcgatcagccggtgcgctctgctgcggatattgaaaagctcggcgaactgaatcccgaacaggatgttccttacgtgctggaaacgatccgattactcgtaaacgaacagctgaatgttccgctcatcggtttttcgggagcgccttttacgctggccagttatatgattgaaggcgggccttctaaaaattacaacaaaacaaaagcgtttatgcacagtatgccgcaagcgtggcaaatgctgatggacaagctcgcggacatgattatcgtttatgcgaaagcgcagattaacgccggcgcaaaagccattcagatttttgattcatgggtcggcgcgctgaaccgcgaagattaccggcagtttataaaaccggtgatggacagaatattccgggagctttcagcagaacaagttccgctgatcatgttcggcgtaggcgcaagccatctggccggggattggcatgaccttcctcttgatgtcgtcggtcttgattggagactcggcatagatgacgccagaaaacaaggcattacaaaaacggttcagggcaatcttgatccgtcgcttcttcttgcgccttgggaagtcatcgagaaaaaagcgaaagcgatacttgatcaaggcatgaaaacggacgggtttattttcaatttagggcacggtgtattccctgatgtcaatccggcaacgctgaaaaagctgacggcgtttgtacatgaatactccgcggccaaaaaaacggaacgatcttcctgagcagatcgttggttataagaagattttcctgtcaaaatcaaggtggacagaccatcaaaagaggtgtttaacaaaatgagcagcaaaaagaaaatgggacttcttgtcatggcttacggaacgccttacaaagaagaggacatagaacgttattatacgcatatcagacgcggaagaaagccggagcctcatatgcttcaagatttaaaagacagatatgaagcgatcggaggcatttcgccgcttgcaaaaattacgcaggagcaggcggagaagctcgcacagcgtttaaatgaaatccaggatgacgtaacattcaaagtgtacatcggattaaaacatattgaaccgtttattgaagacgcggtggcggacatgcataaagacggcattacagaagctgtcagccttgtgctcgcccctcatttttcaacattcagcgtccagtcatacaacaaacgcgcgaaagaagaagcggagaagctcggcggcttgaccatcaagtctgttgaaagctggtatgatgaaccgaaattcgttgattattgggtcagccaggtgaagaaaacgtatgaatcaatgccgaaagaagaacgggatgacgcgatgctgatcgtctcagcgcacagccttcctgaaaaaataaaagaatacggcgatccgtatcctgaccagctggaggaatccgcaaaactgattgccgaaggcgccggaattaccgattacgcagtcggctggcaaagcgaagggaatacccctgatccgtggctcgggccggatgtgcaggatctcacgcgcgatctgtaccaaaagcatccttataaagcatttgtatacgtgcccgcaggcttcgttgccgatcatttagaggtgctttacgataatgattatgaatgcaaagctgtgaccgaagaagtcggcgcaagctactatcgtccggccatgccgaacgcacagcctgaatttatcgacgcgcttgcagcggtcgtgctgaaagagctggacaagtagaattaaacggtaaagaaggcgataaaaatgagtggcgataaaaaacatctggtcatcatcggcggcggcataacgggattagccgccgccttctacatggaaaaagaaatcaaagaaaaacagctgccgcttgaggtcactctgattgaagcgggcccgagagcgggcggcaaaattcagacggcgcataaagacggctacatcattgagcgggggccggattcttttttggaaaggaaaaaaagcgcgccgcagctcgtcaaagatttggggcttgagcatctgctcgtaaacaatgcgaccggccagtcttacgtgctcgtcaacgagacgctccatccgatgccgaagggcgcggtgatgggcattccgaccaaaatcgctccgttcatctccaccggtttattttctgttcccggaaaggcgcgggcggcgcttgactttgtcctgcctgcgagcaaaccgaaggaagatcagtctctgggtgaatttttccgcagacgcgtcggtgacgaagtcgttgagaatttaatagaaccgctattatcagggatttatgccggagatattgataagctgagcctcatgtccacgtttccgcaattctatcagactgagcagaagcacagaagcctgattctcggtatgaaaaaatcacgtccgcagccttcgggacagcagctgacggccaaaaagcagggccagtttttaacgctgacgacagggcttcaaacgttggtggaggagctggaaaagcagcttacgctgacaaaggtgatgaaaggaacgaaagtcacccatatcggccgcgaggagaaaggatattccgtgacgcttgataacggcaaagtgctctatgcggaaggatgcatagtaacagccccgcataaagccgcggcgaaaatgctttctgatctgccggcggtttcatgtcttaaagacatgcattctacgtccgttgccaacgtcgccttaggttttcctgagggagccgtcaagatggagcatgaaggtacgggattcgttatctcaagaaacagcgacttctccatcacggcctgcacatggacgaataaaaaatggccgcacgcggcgccggagggcaaaacgcttctcagggcgtacgtcggaaaggccggagatgaatccatcgtagatctttcagataacgagatcattaaaatcgtaatggaagatttgaaaaaagtaatgaaaataaatggcgaaccggaaatgacctgtgtgacccgctggaacgaaagcatgccgcaataccatgtcggccataaggagcgcatcaaagagttcagagatgcgctgaaagcttcctatccgggcgtatacgcgacgggcgcgtctttcgaaggggtgggcatccccgactgtatcgaccagggaaaagccgccgtatacgattcactggcttatttatttgaaacgtaccagcctccgttatcgtaaaacggaggtttttttgcatgttcccgttctgtaaagggaacaccaataaagagagaaaacatttgaatcttctttgcgactgtgataagttatcttatgtacaaaatgactaaaacgttcaaacggtcaatttaacgaggtgggaaacatgtccgtcgatcggaaaaagctcattctggaagcggcaacgaagtcttttacacaattcggctacaaagcaacgacaatggatctggtggcaaagcttgcaaatgtggggaagggaaccatctacacgtttttcaaaaacaaagaagaactgtttgatgatattttcaccactattttaagagaaatgaaggaacacgcagacgaagcgatgaaaccggagctttcatttcacgaaaatgtccaccgggcgcttgtcgcgattttggaattcagaaaaacacaccagctgactattaaaatttttcaggagaacgccgagattggtacaatagccgttcaggatgtcattgcgaaaatggagcgggccattctgtcatacattaaagaaaagatagaaacagccattgaaaacggaagcattaaaccgtgtgatccggaactgaccgcttttgtgatgctcaagctctacatcgcgctgatatttgactgggaaaaaaaccatccgcctcttgaaaaagagacgatcgccgaattgctggaaatgtatgttggtcaaggattatctaaataatagatgatccttcactttttaggtgccgtgaccgttttgtcaaatgagtcagtttgcggaaggaggcaacagggttgaatacaataaaaagccagtggaaagacattgtaacgaacaagaaactgttaatccccatcattgccatattattcgttccgctgatttacagcggagtgtttttgaaggcgtactgggacccgtacggcacggtggatcagctgccggttgtcgttgtcaaccaggataaaggggcggactacgaagggaaacatcttcagatcggtgacgatcttgtgaaagagttaaagaaaaatgataattttgattggcatttttcaagcgatcttgatcaatcgttaaaggacttattaaatgctaaatattatttattggtcgagattcctgaagatttttcgaaaaacgccagcacggtaatggataaaaatccgaagaagctggatctgaaatatcatacgaatgccggatcaaactatgtcggcgcgacaatcggggaaaaggcgatcgacaaactgaaagcctccgtgtcgaaagaagtgacagagcaatacgcaaaagtcatttttgataactttaaagatattgccaaagggctcggcaaagccagcagcggagccaagaaaatagacgacggcacgaaaaacgcgaaagacggcagcgccaagctgaaggaaaatttagcgaagcttactgaaagcaccgccaccatcggcgataaaacacagcagcttgcagacggcgcggcgaaagtgacaagcggaattcaaacgcttgacagctctatcgcaaaacttcaaagcgcaagcgccgaaattcaagataaatcaggacagattgcttcaggaggaggccaagtggccagcgggctgaaaacaagccttgacgcacaaaagcagctccagcaaaagcttccggatttaacgaatggattaagcgcgttaaacagcaaggcgcaggaagtgtcgcaaaaagcggcggcatttgaagatgcgatcaattcagtcaacctgtcagacattgaaaacgcggttgggcagctcgaacagactgaaaaggacctgcagcagtttaagaagaagctttctgatctgaaaaacagcctggatgcccgggatgatgcggtcaaaaaggtgattaaggacagtgatttcttaacggatgagcaaaaagcgaaacttgttcagcttctgaatgagaagcttccgaaggctgaccttccgaatttagacaatatcgtcagccagcttccgtccggcggagatattcagcttccggatatgtcagtcataaaaagcgcgctcaaagatgtaaaagcgaaggctgatcagctgaaagcactgcctcagtccacatcgaaactgtataacggcgcagcggcggtacaagacgcgattaaccagctgacagcgggaactgataaattatacagcggagcgcagaccgtttttgaaagccaaaacaaactgacggccggcatcggcgaatacaacagcaagttcggacagctcaaatcaggatcagaagcgttagtgtcagggagcggccaagtgtcaggcggcttaacgaaactgctggacgcgcaaaacaaaatccatgacggctcgtccaaaattgagcaggggcaagcgtctctcggcaccggtttaagcaaacttttagacggcaccggacaattgtccagccagctgaaagatgcggctgatcaaaccggggacattaagacagatgacaaaacgtacagcatgtttgccgatccggtaaaaacggacgataacgcgattcactccgtgcctaactacggtaccggactgacgccttatattctctctatgggcttgtatgtcggcggattgatgctgacggtcgtattccctctgagtgaagcttcagggcgtccgagaaacggttttgaatggttcctcagcaaattcagtgttattctgcttgtcggactgattcaatccgttattgtcgccacggttcttttgaaaggaatcgggcttgatgtggaaagcacgtggagattctatctctttacgatgattaccagcatcgcgttcctgtccatgattcaattattggcgacaacgatggggaatccgggacgctttatcgctgtcatcattctggtgctccagctcggggcaagcggaggaaccttcccgcttgaactcctgccgggattctatcaagtgattcacggggcactgccgatgacttacagcatcaacgggttccgtgccgtcatttcaaatggcgactacggctacatgtggcagcaggcatccattctgttgggcatcgccgttgtcatgatcgcgctgaccatcgtgtattttacggtgcaaagcaaaaaagaacacaaaacggaagaagaaataacagcataagaaaaagaggctctgagcagatgctcagagcctctttttttagatttcgatcgtcgtactattaaaatccccatcttaccaacagtccggtatacgtcaatcctccgccgaacccgaataataccagcgtctggccttccgacagtttttttgctttcacagcttcatccaatgcgagaataatagaaaccgatgaagtgttgccgtaatattcaacgcttgtcaacgtccgttcaagcgggaagggcagtttttcgcagatggattcgatcatccgcatgttggcgctgtgaggaacgaaccaatccagatcgtcttttgaaaagccggctttttctaaaagggcattgcattcctcaggcacggttctggccgcccatttatatacttcgcgcccgttttgcaccatgtttcctccgcctttaagcggctcgccgtttaattctgtgctcagtcccgtgcgatacagcacgtccgcgcttcctcccgctgttccttgcacggctgccaaaaagcccggcgctgattcatcgcgttccaccaatagggcgcctgcagcgtctccgaaaagaacgcaggtcgtccggtcagtataatccgttacctttgataatgtttcaccggcaatgacaatcactttttgatgggaaccggcggtaattaatgcgtctgcgagctgaaggccgtaagtgagtccggcgcatgtggcgttaatatcaagcgcccccgtgtgcggccagccgaagtaagcctgcacgcgtgccgcggtgcttggaaacgcatagtccgccgtcgttgtggcgacaaggatcatatcgacatcatcaagagttccgctgtatcgttctgcaaggttttgcaccgcttccacacacaaatccgatgtgaattcatgttcgccggcaatgcgtctttccttcataccggtgcgctggacgatccattcatcagatgtatcgacgatgcgctccaaatccgcgtttgttaatcggcgtgccggagcatatgtaccgattgctgtaattttagattttgacatgaaaaaatcactcctttatatcagattataacacctgatattattacttggtactaattttaataaaaaaacccaagcagcatccgctgtttggggagcatgagatatctatttgtaaaacgggcttgtgtgaacgattaccaatgacggcagcagcggcggcatgaatgatgatgcttctttttatctttcttctttttttctttcttctttttacaagggtcttcttttttctttttacagtgatctttttcttttttacagccccagaaggctgcaccagaccaatcatcctcaaaccaatcctcaaaccaatcattatgaaaccttttccgcttgtgcggtttacggctgatcatacatttccctcctatgctcatgctcccttcattctatgaaaaaagagaaggaaaagattggacgggttgtggatcaaaagagtatattttaagaagaataaaattgataggaggaatgacctgtggcaaatatgaaacatacgatggaactgattaaagaattggtgtcgattccgagtccgacgggcaatacatatgaggttatcgcctatacagaaagtcttttaaaagaatggggcgtctcctcttacagaaaccgcaaaggcggtctttttgtcacaatccccggccgtgatgacaagaaacacagattgctgacggcgcatgttgatacgctcggcgcgatggtaaaggagataaaggcggacggccggctgaagattgacttgatcggcggcttccgatatcactcgattgaaggggaatattgcgagatccaaacttcttccggcaaaacctatacaggcaccatcttaatgcatcagacttcagtgcacgtctacaaggacgccggcaaggcagagcggaatcaggagaatatggaagtccgccttgatgagcctgtccggacgaaggaagagacgtccgatctcggtatcagggtcggcgatttcatctcatttgacccgcgcgtgcaggttacgccgagcggctttattaagtcccgtcatcttgatgacaaagcgagcgtggctctgctcttgaatttaatccgccgcatcacggaagagaaaatcgaacttccgtatacgacgcattttctgatttctaataatgaagaaatcggctacggaggcaattccaacattcctcctgagaccgtcgaatacttggctgttgatatgggggcgatcggcgacggccagtctacggatgaatataccgtctccatttgcgtgaaggatgcgagcggcccgtaccattatcagctcaggaaacatctggccggccttgcggagcgctatggcattgattatcagcttgatatttatccgtattacggttctgatgcctccgcagccatccgttcgggccatgacatcgtccacgggctgatcggcccgggaattgatgcttcacacgcttttgaacgcacacatgaattatcgcttcttaatacggcgaagcttttgcaccggtacgttttatcgccgatggcataaaaaaccctgcacggaaatcattccgtgcagggttttcattttaacctgagatggttgtgttttgttctgttttggcgaggctcatgaccttcgcgcctttaacgggatcatactggccttcccattttgacatcacaacggatgccagcgcgtttccggtcagattgacgaccgtacgggccatgtccataatccggtcaacaccggcgatgaatgcaaggccttctgcaggaacgccgattgtgccgagtgtcgcaagcaggacgacgaaagaagtcccgggcacggcagccattcctttggaagtgaccatcaagacaagcacaagggtaatctgctgccaaatggtcaagtcaatgtggtatacctgagcgaggaataaagcggcgattgattggtacagcacagatccgtctaagttaaaggtatatccgatcggcacaacaaaggaaacaatacctttcggacagccgattttctccatcttctccatgatgcgggggagtacggtttcggagcttgacgtactgaacgccaataaaatttcatccttcatataggcgaggaatttgaaaatgtttaaaccggcaagctttccgacgattccgaatacaacaatgagaaagaaagccaaagctacatatactaaaccgaccagtttaccgagtgaaagcagggaactgagcccaaatttggaaacggtaacaccgatcaacgcaaaaacaccaaacggcgcaactttcatgacgaggttcacaacatggaacatcgcatgagaaacaccttcaaagaaggccaatacgggctttcctttttcgccgattgccgagatgccgagtgcaaacagcaccgtaaagcagatgatggcaagcagatctccttcggctaatgattggaagaagtttgtcggtacgatatgcaggaatgtgtccgcaacggatttgccgctttgttctttttctgtttcaacatattgactgatatctgtcttttgagcttcatgtatattaacgcctgctcccggctgaaacagattcgctaaagccagcccgagaataatggcaaaagtggtaatgatctcaaaatacaaaatcgttctgaagcctaattttccgacttgttttccgcttcccgcgccggcaacgccgatgattaagctggagacgacaattggaatcactatcattttgattaagcgtaaaaacaaatcgccgataggctgtaaatatgttggaatggcgggattgccgtaccagatgacaccgactacaacccctagtatgagtccgacgaaaatttgcgtcgctagtccaaagcgtaattttttcatagattacctcccgaagaaaaaagtgcaataagtatctaaaaagatagctattagaacaaattataatagaaaagaaaacaatccgtctatagaaaaatatagattgaatatactgaatcttttaaaacgtacagataattgctaataatggtgaataacgccctattcagaaagtatgatgacggccgaaaaaacgggcgccgcacaacttagaattgtgcggcgccctattgtcacatatccttaattttcaagcagtcattgcacagattaatgtgacactcatactgctcaacaatctcatttccgcattcttcgcatttcttaccgggtaaatttctgaaaaaatccgacatcttttccaacatacccatccctctttcattgttttgtctctacattgtattataacagtttaagaaaatcaacggctgttttggcacaatgtttaaaacatgcaatttgtacgaaaaataggtatattggaggaaaggatctttttatcataaacattcggaggattatatgaaagttacagttattggatgctgcggcgggtttccggccgcaaacgaagcaacttcaggctatctgtttcagtccggcggctattctctgctcgtcgattgcggaagcgccgtattatcaaagctgtttgcctatgttccggcagaagagcttgatgccgtcattttgtcccattatcacgatgatcatatcgctgatatcgggccgcttcaatttgccaaacaggtcggctcctttctcggaaaagggacgcatgcactgccgatttacgggcatgatgctgatatagaacagtttgagcgccttacatataaaacgcatacaaaaggagtggcctatcagccggaccgcccgctttctctaggtccgttcaccattacctttctgaaaacggtgcatccggtcacttgttatgcgatgcggattactgacggttcagcttctgttgtgtatacggctgattcaagctaccaggacgcgtttatcccgtttgcggaaaatgccgatctgctgatctgcgagtgcaatttttacgcggaccaggacggcacgtcagccggccatatgaacagtttggaagccggacggatcgcgaaggaggccggagcgggggagctgattctcacgcatctgcctcatttcggcgagcaccggaagctgaaagaagaagcggaatccgtgttcgggggcgaagtgacaatcgccgcttccggattaaagtgggagaaataaaggaggagcaccatgttatttatcgacaaccaaaacataaccgacccgaggatcaacctcgcgatcgaggaatattgcgtgaagcatctcgaccctgaacagacatacctgctgttttatgtcaatcagccgtcgattatcattgggaagaaccaaaacacaatagaagaaatcaatacgaaatacgtagaagataacggaatcatcgtcgtccgcaggctgtcaggaggcggcgcggtttaccatgacctcgggaatctgaatttcagttttatcactaaggatgacggcgacagctttcacaattttaaaaaattcaccgaacccgttattcaggcgctgcgccagctcggtgtggaagctgaattaagcggccgaaacgacatcgtcgcggacggcagaaaaatttccggcaacgctcaattttcgacgaaagggcgtattttcagccacggaacattaatgctggattccgccattgatcatgttgtgtcagccttgaaagtgaaaaaagacaaaatcgaatcaaaaggcattaagtcgatcagaagccgtgtcgccaacatcagcgagtttcttgatgacaaaatgacggcggatgaattcaaaaagcacctgcttcaccatatttttaatacaaatgatctttccgaagtgccggaatataaactgaccgatgaagactggaaagcgatccggaagatttccgaagagcgctatcaaaactgggactggaatttcggaaggtcgcccgcatttaatcttcagcattcgaaacgttatccggtcggatcgattgatctgcgtcttgaagtgaaaaaaggaatcattcaggactgcaaaattttcggtgatttcttcggtgcgaaagatgtgagtgaagtcgaacaggcgctgaccggaaaacagtatgaccgaaccgctatcaaggaggcgctggccggaatcgatctgaaacagtatttcggcaaaatagagctggaagatttcctcgagctgatttattagaacatttgccgaacgcatgatttgaatcagcgcccgtttttgtgaaatgatagaaccataatgaatggggagggatcatgatgaaagtatttctcatcggagcaaacggacagatcggacagcggctgaccgggctgtttcaaaaagacggcacgcatacgctgcgggcgatggtccggaaacaagagcagaaagaagcgcttcaagccgcgggaacagaagccgttcttgcagatttggaaggaagcccggaagacatcgcgaaagccgccgaaggctgtgacgcgattgtgtttaccgccggatcaggaggaagcaccggatacgataagacgcttttgattgatcttgacggagccgcgaaagcgatagaagcggcaaagatagcaggcatcaagcggttcattatggtaagcgcccttcaggctcataaccgcggcaattggaatgaagcgctgaagccgtattacgccgcaaagcattatgcggataaaattcttgaagcgagcggtctgacgtatacgattatccggccgggcgggttattaaatgatcccggcacaggaaatatcaaagccgcggccgatttggaaagaggttccatttcaagagacgatgtcgccaagaccgttatcgcatcccttgatgaaccgaatacgtatgaaaaagcattcgatctgacggcgggcggcacgccggtcagtgaagcgctgaaacaattatagtttccggttttacggcactcggggctttttgcccttgagtgtttttctatatttttctataataaaagtgaacgtttattccggataaatgaatgactattcattcattacaatttttaaaggggtgggaaaatgaatctggtttccaaattggaagaaacggcatcgcagaaaccggaaaaaccagcttgtctgtttcaagatcagtacatgacgtatgaggagctggcaggtaaaatcaaagcatttgcaaacggcttggaggacaggggactgaaaaaaggggatcatctcgcgctgctgctcggaaatacgcctgattttgttattgcgtttttcggcgcgttaaaagcgggaattgtcgtcatacctgttaatccggcatatacaccttcagaaatcgcatacatgctgaaaaacggcgatgtcaaagcgatcgccggcatcgaccttttaattcccgtatttgaaagcctgcacggctcgctgccgctgctggagcatatcattatcagccagacagcagagaacgctccatcgacagaagaccctcaattgcgcttaaaaatgacaacgtttacaaaaatgcttcgcccggcggagcgcagcagaacttatccgacattgtccaaagatgatactgccgtcattttatacacctcagggacgaccggaaaaccgaaaggcgccatgctcacccatcagaatcttttctccaatgcaaatgatgtcgccggatacttaggaatgaatgagaaagacaaaattgtggcggcattgccgatgtttcacgttttttgtttaaccgtttgtatgaatgcgcctctgatgagcggagcgtgtgtcttaatcgagccgcaattcagcccggcttctgtgtttaaactgattaaaagccgtcaggcaaccatttttgccggcgttccgacgatgtataactatctgtatcaatacgagcacggcaaggcggaggattttgcgtccgtcagactgtgcatttcaggcggggcctccatgccggtcgctctgttgcagacgtttgaacaaacctttgacgtcaccattctggaggggtacggactttctgaagcgtctccggttacttgttttaatccgtttgaccgggggagaaagcccggctcaatcgggacgaatattttacatgtcgaaaataaagtcgtcgatacgctaggacgcgaattgcccgaccatcaagtgggagaattgatcgtgaaagggccgaatgtgatgaaaggctattacaagatgcccgaggagacggagcacgcgctgaaagacggctggctgtacacgggtgatttggcgaagcgcgatgaagacggttatttttatatcgtcgacagaaaaaaagatatgattctcgtcggcggatacaacgtctatccgcgcgaagtagaagaagtgctctacagccatgagggcattaaagaagccgtggtcatcggcgttcctgacgccaaaacgggggaagcggtgcatgcttatatagtgccgggggacggtgagctgacagagcaggcggtttttgattactgtgaaacacatttggcaaaatataaacggccggcggaagtggtttttcttgatgagattccgaagaacgcgaccggaaaactgctgaggcgggcggtccgggacatgcttccgaaatgacggacgaaaagcgaagccggggggcttcgcttttacatgctgatccggtcagctctgcgattcttccttaatgatgctttgcacaagcttcgtatcatgccgggtcagtttgtaatacgtgtttttatacttgtacagcatataattgccgccttcgagccacatgctgaatgaatcgaaacggtcttcatggtatttgaccgttccgtcgtaatcgggagatacgcttttggtcagtttgacttgttttccttggttcaagatatcgagcatatcttttacattctgcctgtctttaattttgatttctttttttccgtgctcagacagaataatcagatctgcgttgcttgatggaaacacatcgccggtccggctgtatacatagaagaaagcaataaccaaaagggcgattactacaataaacgcgattatttttttcatattcatcactccgttttttagtctttcccgcttcctgttgttccattcttttctgttgtgaaaagattaacatccgtttcggaggcttggttctatttatttgcatttatgcttacaataggagtaagtcataaggctaaggagggagacttccatgcgcaaatggatagcggcagcgggacttgcctatgtgctgtacggcctttttttctattggtatttctttatgacaggcgactccgccgtcccggaggccgtaaagggaacgaaagccgatccgtcctcgtttatggacccgggccgcctggaagccgctgaaaacttttcaaatgtaaaggattttttatttttcatcggtgcgccgttagattggtttttattttttctgctgctcattacggggcttgccaaaaaaataaagcattggctggaagcagcggtgcgctttcgggtactgcaaatcggaagcttcgtatttgtgatttcactcatcgttacggcggcttcgcttccgcttgaatggatcggatatcgggtttcgcttgcgtatcatatttcgacgcagacaacagcaagctggataagagaccatgtcattgatttctggatcagttttccgctgtttgccgtgtgtgttcttgtgttttactggatgatcacgaagcatacaaaaaaatggtggttttacgcttggtgtcttactgtgccgtttaccctgtttttgtttttcctgcagccggtcgtgattgatcctttatacaatgatttctatccgctgaaagacaaggagctggaaagcaaaatcttgtcgcttgccgacaaggccgatattccggccagccatgtttatgaagtaaatatgtcggagaaaacgaatgcgctgaatgcgtatgtgacgggaatcggttcgaataagcgaatcgttttgtgggatacgacgcttaacaaactgaaggatcgggaaattttgttcattatggggcatgagatggggcactatgtgatgaagcacgtgtacatcggactggccgggtatctcctgctgtcattagccgggttctatatcattgacaagctttataagcggctgtccaaattcttcggccgaatgcttcatataaaggggcctgaagatctggccgccctcccgctgttattgctgctcatatctgttctcagttttgcttctgatccgattacgaatgccgtctcccggtatcaggaaaacgccgccgaccgctacggcattgagctgaccggaaaccgggaagcggcgattgagacgtttcaggacttggccgatacgggactgagccgggtcaacccgccgtttctcgtcaaaattttcagagggagccacccgtcgatcatggagcggattgaacatgcggaggaagaaaaataataaaaaaaaccggcggggccatggccgacgccggtttttttatgttttactgagctgccgcctgtacgttgatcagcccttttccgtagtagaaagcatcaccaagttttgtagtggtgttttctaaactgctgcggacttgagtgtttgtccagttcgggtgcttagaaagaatcaaagcagccgctccggcaacgtgcggagatgccattgacgtaccattgtacgcgccgtatttgtttccaggaagcgtgctttggatagagacgcctggtgccatgacatcaagctcagaacctacgcttgagaaagatgctctttggttgctgctgttaacagcgcctaccgcaatgacagaagggtatttaccagggtagcccactgtgcttgagccgccggaagtgccttcgttaccggctgccgctacgactacgacgccggaagcaacggctttgtcaactgccgcttttaacgctgcagaaccagaaggtccgccgaggctcatgttaataacgtccatattgtttgcgatcgcccactcaattccgttaatgatccagctgtactggccggaaccgtcagcgccgagaacttttacagcgtaaagagatgcgcttggcgcaacgcctaatacaccgactgagttattaagagccgcaactgtaccggcaacgtgagttccgtgagagttgtagtcttggaaaggatttgtttcagaaggaaccatgctggctccgcctgctacttttaaatcaggatgagaagaatcgataccgctgtcgataaccgctactttcacatttgatccggtgaagccttgagagtgcagagcaggggctttaatttgtgatacgccgtaaggcacggactgcgcgtacgcttttgcaacgtgatcttcttcaacgtaagcaacgcttgggtcttttttcagctcttttacagctttttcatttaatgtagctgaagctgcgtctacatatttgaattgcttttgcactttcccgcctttttcagaaatgacatcttttttcttagcggcgctcatcgtgctcattgtctgtttaaatccgacaatgtatttcttttccccgtttgatttccctgccgcctgggcaggagacgtgctgccgaacgccatcgtaaagattaacgctaaagcaaacagcaaactgatccatacctttttgcctctcactctttatcctctcctttttttcatttgcagaacaaccaatagacagattattctgtggattaattgtatagcatggaataatattttagtagacccaatttttttcaatttgttttatttctatttaggtatatcatctctctttcgtttaataggaacccgaaatatttaaattttaatggaaaaaaccgatggaaggacatgagtatttgtacacagccgcaatcgctctcttgtttgctgggtcgaacggtttgattccatttttggaagctgcggcaaaaacaggataaatgtcaccttttgttgaatgcagaagtctgatggaaacgaaagcggaatgaaataaagcgggcggcatgaatcagtcttcggctttcttgacggagaaaagctgtgaaaccattttataaaaataatgataatgaatatcattgatacttatattgtcaatgatataattgcggaaaaacgaaagagggggaacagatgaaaccaattttcagtatgctgatgatcttatccgttctcttcataacggcatgctcagaacaggaacatgaaaccgccgtcaggcacgatctggggacggcgcatgtggctgcgcacccgcagcgcgttgccgtgttgaatccgggctttaatgatattctccatgatctcggcataaagcctgtggctgcggcggataatcggacagagcgaaacgacggcagtccgtccgtcgggcccccgtcacatcccgatttgaaaaagatcacttcgttaaagcccgatctcatcattgcagactcaagccttcacagggggatataccgaaaactgacaaagatcgctccgacaatcgctttaaaaaatgaagctgcggattatcaggatgcggttgacgctgcccttactattgaaaaggcggtcggtaaagatggcatcatagagaaacaattgtcggctcaggaagaaaagctgaatgacatcaaaagaaagctggatgcagaaggcggcacgattttattaattgacgctgcaaatgacagcatttccgtaaaggatgatcagttttttacgtcccggcttttgacgctcgcagggtttacctatgcggtccagacggattccggcgggaaatcagactctatcaagatgacgcccgggcagcttttgcatatcgatcctgattacatcgtactgttggacggtgagaaagaactcgaaaaaaatcacctctggaaacagctgacagccgtaaaaaacggacacgtttaccgcgcggacagggtggtatggacggagcgccggagcattgacggggcggacgccatattacatgatcttcagaaaaaaatgctcgccaaaaaggcccaaaactgaattcgggcctttttgttatgattctgataggtggctgcttacattgtaatctttgacgcgccatttattttcaattcgttcgatattgcttaggcacgcattgacaagctttgcgttttggatgtcggtatcaccgtcagaaatggccgacaagagggcgtgaatggctgcgccgtgagcgacgatcagtactttttgatcaggaaaccgctcctgaactttcactaaaccggcaagcattctgtctgtcagctcttctgctgtctccatgttcgggtagtttttatccgggtagcgcttcgaccgttccggtaaagacattccttccgcatcaccgtagctccgttctctgaaatcttccatgaccacaatgggaagattcaaaaacccgttaataatgtcagctgtttttctggcccgtttcatcgggcttgagacgatgacatcccattcggacccctttaagtactctcctgtttctttcgcctgacgctctcccgtcgcatttaacggaatatccgatttgccttgaagcttcttttgggcattccaatcagtctctccatgtcttactaaacaaacggcagtcataaagtctccactccgatcattttttatcgatatcatctattatactgccgttacgttaacacttcaaagagaagcgccagtccgactccgcctccgctgccgatcgctgctgctgcgtagcgggcatccgggcgtctttttgcttcataaaaaagccgggtgacaagcgccgctccggaagccccgtacggatgcccgacggccagagcgccgcccctgacatttattttagaatacggcactcgaagctgctgtgaaaaaacgcatattttgacggcaaacgcctcgttgatttcgtatatatcaatatcatccggtgacaggtcccgttccttcaaaagttttttgacggcataaaccggagctgctgacggataatgcggatggacgccgcttaccgcgcttccgataaaacgcaatcccggctttaaaccgagagaccgcgctttttgttcttccatcacacaaactgccgccgccccgtcagaaattccgcagctgttggcggcggtgacagagcctccggactgaaagacgggcttggcacgggagatgagaggctccatgttccgctttttcagcatgttttcgtcagcggcgaatccgtgacagggaagaatttccgggcggtacaagccgtcttcgtgcgctttgacgctccgttcatagctgagaagggcatattcgtcctgcatctttctcgttacgccgtaagcctgtgccgtatactctgctgctatgcccatatcaggatcgccgatgtgttcaggagaaaagcgcgcccgggatgagaaaggggaacggctgctgctctccgctcctcccgcgatgtatgtgctccccgcaccggctttaacaaagtggcacgcgaccctcacggcgtccagtccggagccgcactgcctgtcgatggtcgtaccggacacgctcaaaggaagtccggcggccaaggctgacagccgggcgagattcccgccgcggcccgtcgcgtttccgatcaggacttcatcaatgtcttcgggcatgttccggctcaaatggcggatcagcggagctgccaaatcttctgggagacagtcttttaacaggccgttttcccgggcgaaaattgtccgtttcgcatccgtaattacagcttccattccatcatgtcctttgcctgcttttgtacggcggcacgggcgatctttccgccggctgtttccggtatttctgaaaacagccatttcttcgggattttatatgccgccagctgctcgcggcactgtttcttcagttcctttacatttgcatctccgtcgatcaccgcaacggcgatgctgccccaataatcatcaggaatgccgatgacggccgcttttctgacgcccggacagcggttgagcacacgttctatctcttcagggaatacattcaggccgcctgatacgatcatcccgttttcacgtcctttgatataaagatagccttcacgatcaatatatcccatgtcatcaaccgtcatccagccggaatcatcaggttttgcgccgttgatgtatccggaaaatttcatcgggctgttcacaaaaatcttccccgtttcgcccggcatgcagcgttctccgccgggccggcggatttcgattgtaacattttcaaacgggcggcccgccgcgtcaggctttcgggcgctgtcttcaggcgataagaacgccacgaaactcagctcggacgttccgtaaaaatcgtacaaccgcaaatggggatagcgctctgacagcgcttgttttgacgaagcgggccagtctgcaccggaagaaatcaccttgagcggtgtatccggaaacgcctctagtgagagcagggcgtccgtcattgtcggaacggtatatagaacgtcagcttgtctgagccggtctttcattccggccggattgaattttctttgaaggatgacggttccgccgataaacaaagtgctgacggcgccgtataaaaagtgtgacgagcgaagcgtgcccggtaccagcactttgtcatcaggggaaatgccgaattcacgtttcgtacaagaaaagctctccagccacgaacggtgagagcgggtgaaggctttcggcttaccggtcgatcccgaggtgaatccggtataaaagggcaggccggcgtttttgataaaagcgccttccgttttttccgcctcgatcaaaggcctgcattcatcccacaggatgacaggcgttttgacgccgtccagtctgccgctcagccggcggtcacagatgacgaggccggttttgctgatgtgcagctggtccgcgagttccgccgctgccgagcggggatctaacggaaccgccgtgcagccggcatgcgccgcgcctgcgaaaagttgtaaaaaagggatgccgttcggcagtaatattgcaatgttttccggcttacttgaaaggctgccaagccagtttgcggtttggttaaccagcctgttccaagtttgataggtgatctgttctgtttctgtctgaattgcgatctgttccggcgcttgtccggctgtatctgaatatgatgatgtaatcatgatgactaaaatcagcttcctttcgtcggcaaaagccggcttgcttgaagagtttttctgattcttacggctgcgaatgaggctgcggccgctttaagcagatctccgggcacatagatgaggctgagctttacggcagttaagatatcaatgtgcatcataaaagcctgaaagggaatgccgatgacatacaaaaacagcacgccgaacaagaactgtctgataaacaaatgggggacagcagctgagcgaaggccttggatgctgaggctcagcagtaatgccgccagcggatatgcgataagatatccggcgctcggcccgaaaaaaaccccgaacccgcctctgccgcctgaaaggagaggcgctccgcatgccacaatcagcaaaaaaagcaattggcttaaaaacgccgctttcggttttaggatgcttcccgataagagtacaccgatcgtctggagcgtaatcggaaccggcgtaaaggataagaaaagcggcgggagcagccccaaaagtcccataatggcggtaaacacggcaatatgcatcatttctgtcaatttcattatgtattcctccagcttatcaaaatatgtttatacaataaagcgagtctttatgtatgtcaactctattatattttaagttaacattaaaaagaccggccctttatgaaaaaggccggtcggtttgtctttattcttctgtaaggataacaagtgaatcaacggatgatgcaacgtgggaaacggcgcggctgacttcttgaaggccgccgagaaaggcctgcaaatcaacgtcgattttgcctgtctggtctttgctcgttttcatgctttggacgatgtcatcaaacagacggttgatctgcgccattttttctttcgtttcacttacaagtccgtttacatctttaatatgtttggacacgatgttgatttgtgtattagtattgttcacaagctctgatacggtggaaacggtttttttcgtatcctctgaaagctttcttacctccgtcgcgacaacggcgaaccctttgccgtgctccccggctctcgcggattctattgaagcgttgagtgacaggagattcgtttgctcggcgatccccgtcacgatgccgaagattttttcgatctgctgggcgatgtcattcagcttgtccatttcttcttcaatctgcagaaggctggcgtcgattttattcatctgctgctgctggctttcaagctcttttttcccgccgattgatttttcttcgacatgtacggaagtgacggtgccggcttttgacgcctcggaaatgccctcggatttatcgaccagctcctgcacggctctgctcgtttctgaaaacaaatcagcgagtgatccggatgtttcctggattttttgatgaagacgggctttcttttcctcttgttcgtcacgctggcagttatattcgctctggaatgcttcaaggacgagctgctgttcaagattcaatattttcgtcgtcgctttgatcgcttttaaaagctcatgcaaatccggaatggttgcttcatatatgttcatcatcgacagaagcagatcctgaaacgctcccatataccatttcggttcaaggccgatccgcaaatggatggaagcgatgcgctgtcttttttcaatgaattcatcatcaatcgtgccggcaaacatctcatggatatgacgccgtaatgtttttttcaggcgctcgaccgtgctgtggtcgttaatgatcgtcattaatgatttttcgtgatccaggtttcggtaaaaggaatcgacgattgttgagatatgttctttaattaacggctgcagctcttcaagcacatgaagttcttcgtttcccagcctgaccattttcagctgtttttggacatctgcatattgatttgaaagcgcgatgcgtttttttccatcggcttccgaaaaataagctgtttcttttttgcggtcttttttaaataacaatataagttcccccagatattctctttttctttttatcggtatggaaggaacttgaatgaaggaatctgataaaaatattttaatgcaaaaaaataaaaccattcgtacagaatggtttagttaatcttggctgaggcgcttcagcggcttgatggcgggaccttcgacaaccccgccgtcgggtgtgaaccgggacccgtgacaaggacagtcccacgtccgttcgccgtcattccattcgacctcacagcccaaatgggtgcatgtcgtatcgacaaggtgcagacagcctttttcatctttataggcgccggcccgtttgccgtttaccgttacgatttttccctccccgggccgaagagtctcaggtgaagcgtccggcctctcaagtttgcccgagataaggtgtttggccacgtcggcattataggaaatcagttttttcagtcccggatctgcgtggaagcgtgacggaataaacaggccggaaaacgggttctttttgttttgaatatgatcagccaaaagcttcgccgcgagcgctgagcttgtcatgccccattttttaaagcctgtcgccgccaaaatatgttcttcatcgcccgagatgggaccgatgaacggaattttgtcaatggtgacaaggtcttgtgcagaccaatgatatgggatgctttcaactccgattgtgtcttccgcaaattgtttcagcgcttcgtaatgctcggacatttcttttccctggcctgttttgtggctttcgccgccgacaagaaccagtttttcaccgttcaaatcggtgtatcgcagtgatctggacggcttgtctatgctgagatacatcccgtccggatacgcttgtttcggttttaccgccagtacgtaggatctgctggcatacattctggcggcgtaaagcccgcctccgtcataaaaaggaaagtgggaagagcagacaatatagctgcacttgatgccgtgtctgtttttcgtgaccacttccggctgcggttctttttttatgtcgatcgcagccgtctgttcaaaaatccgcgccccgtttttaacgatctctttaacgagcgccgcaccatataaaagcggatggaattgcgcctgattcttcatggcgagaccgagcctgcaatcaacggggacgggaagttctttcacaagctcgtgttcaataccgagcttggtataagcttcctgctcactgcggatttttttgacgcctgattctgtattggtgtaaagatatgcgtcttgttcaatcagtctgcagtcaatcgaaaggtccttgatgatctgcttcatgtcttccatggcgcggagatgggcttcgaaatacagccttgcgctggtcaggccgatctgctgaataagatcggcatagatgaaatcatgctgggcggtgatttttgcggtcgtgcccgcggtcgtcccgtttaaaatccggtctgcttcaatgacagcgacacggaaacctcttttcgtcagttcgtatgccgttgtcaggcccgtaattcctccgccgataaccgcaacgtcacattccgtatcttcagtgagggcgggaaaggaaggaatgtcagctgttgctttccaataggaagccggttcctcgtttgaaaaagtagtcaattcagatttacctcctctgttgtatattcttaatttttccaataagactctgttcatacatgaaattcgtataagatgctcaaattactcataatatagtaattaatgtaaaggagtgatcaaaatggctaaccagaagaagaaaaccttgccgccgcagcatcaaaatcggcagccgggctttgaatatgtaatggacccgcgccccgtttttgacaaaccgaaagcggcgaaaaaacttgaagggaaaacggcgatcatcacgggcggagacagcggaatcggccgcgccgtatccgttttattcgcgaaggaaggcgctaatgtggtcatcgtttactttgatgagcatcaggatgccgaagagacgaagcaatatgtagaaaaagagggggcgaagtgtctgctgatcgcaggggatgtcggcgacgaagccttttgcaacgatgtcatccgccaggcgggccaagcctttccttccattgacatcctggtcaacaacgcaggtgagcagcacgtgcagccggggattgagaaaatcacgagccaccagctcatcagaacgtttcagacgaatattttttcaatgttttacttaacgaaagccgcgctccctcacctgaaaaaaggaagttcaatcattaatacggcctccattaccgcctataaaggccacaaaacattgattgactattcagcgacaaaaggggcgatcgtcacgtttacaagatctctttcccaatctcttgtcactcagggcatcagggtaaacgcagtggctccggggccgatctggacgccgctgatcccggcgagcttctcggcgaaggaagtggaagtcttcggctcagacgtgccgatgcagcgcccgggagagcctgttgaagtggcgccgagctatttgtacttagcaagcgatgattcttcctatgtcacgggacagacgattcatgtgaacggcggcaccatcgtaaacggataatgtaaaaaaagccaatccatatggattggcttattcactctgtttgagtgcggcatattcttttgaaagcgtgaggaacgcttctttatttttatcatcaagcgccttattaatctgcatggtcagcatggcgatccggcgtttatacaaggattcatcaagcaccatttgaatgtaaatatcggccattgtcacatcgaattcgtttgctttttgcgtgttgcgggacttcatgagctcagtgtacgactttttctctttcataaagaatccccccaatgccttttttatagtatatggataacggccggaaaaatcaattaatttttataatctttagacaactaatacttggaattatatcgacatatcctgcaaattgacgaaaaaacgaaaattagcatcgtataaatgaggtgaaatgaaaaagaaaaataatatttaaatagtaatttaagactaaattacatctttaaaaggtgatttttagctatattcaaaaaaaacctgtcgttttccaatgacagatgatagattattagtataaattttcaagaaaaggattggaggctgcacattatgtgccagaaaacacacgcacccttagaaagctatgaagtaaatcgttcaaccatcgctgttttgcctgaggaaatagacggtaaaatggggtctaaggtcattgaaaaagactgcattctgtatgtcagtatgaagccgattcacatcatcgacagaagctgccgctactttggctccagctatgccgggagaaaagcgggaacatatgaagcgattaaaatttctcacaagccgccgattatggtggacccttcaaatcacatctttttattccctacactttcttctgcaaggcctcaatgcggctggatatctcatgtgcatgttaaagattttcaaccgacggcatttgatgacacagcggtcacgttctcaaacggcaaaacgatggagctggaagtatcctatcattcttttgaaaatcaggtttacagaaccgcctatctcagaaccacttttcaggacaggatgggcagtcatatcccgaagcggcaggaattcatgctgtatccaaaagaagagcggacaagaatgatctacgactttattttgcgggagctgggggagagatattagagaaagctgtgatgtgaagggacgggtcctctccttttggggagggcttttttcgatttacatgcccgggcagagttgtatcgtgtccgtctgttggctatgatgatgtaaagagtaatgatatttcattttaggagagatgggcatggatgtgtttgcaaaatatgtatcaggaatcgataacccggatcaccgtctcaaagcagaggaaattttgtcgtggacggctggccaatttccgaatttagaagcgcagatcaagtggaacaaaccgacatttaccgatcacggtacctatatcattatgtttgccgcggcaaaaaatcatttgagcattttacctgaaaaagagacgatggagcattttgccgatgacatcgctcaagccgggtacagcgcttcttcgcgcctgttcagaattcgatggactgatccggtgcactatgatctgcttaagaagatcatcgaatttaacatcaaggaaaaagctgaaaatccggggttttggcgctagcggacgtgatgttgaaggaggaagacatggacgttttcaaagactatttatcaagtatcgacagccctgatcatcgtctgcgaatggaggaaatcctgtcgtggacggctgaccaatttccgaacttagaagcgcagatcaagtggaacacgccgatgtttaccgatcacggcacctttattatcggctttgcggcagcgaagcatcatgtaagtgtttcccccgaagaagctggaattgcgcattttgccgaggacattgcctgtgccggctacagcgctacttcccgtttgttcagaattcaatggactgaaccggtgcattatgagctgcttgaacgcatgattcaattcaatattcaggataaggcggactgctcagcattttggcggaaataatgaaaggaatgttaaaaaaacaaccctgaggagggctgtttttttattggaaacacatgatcagcccattttaatcaagaagcaatggatgacgtactataaaaaataaggagtacgaagcagtgaatgaattttataaggcgttaacacatgtaaataaaattttttatgaaccaaatcacttaacgatacatgatattcaagaagaagctcaaaactcagagtatggggccggtatgtttcagctgcattcaaaatcagttcgattcagagtcgcaaaaataacgcctgacaagataggacagtttgttgctttttgggaaaaagatggagatggtaaaaatcaagccttttcatataaaaaagctgctgatttattggttatcaatacttttgccagtaataatcattttggataattcatttttccaaaagaagttcttgtaaagcaaaatatccttaaaacagccgctacaaaaggaaaaatggcaattagagtttaccctaaatgggaaaatcccactagcaaacaagctattgaaacacaaaaatggcagttggcatattttgttgaggcgaacgatgcagatcgttttccagcacaagacctgttaaagctatattctaactaaaattggacagccctgagccggctgacagtatgtgaagttaaccggtgcgtgagttggagaataacggggaacctcaacaaatgaggttcctctaattgttatatagaaatcgacattttgaatgtaacagagtttgtttattaaacgtcatccgaaaaataagggatttgcgtatccggcagaccctcacgaaacgcacgatgtcagaaatcttgcgttcaaaattctttatttgaccacagacatgctgacgctgctgcctgacactgtcaatttggcaaaatcctgtgtatcaatcacaggtgtgactgctttattgtcaatcgtgatgttcgtaaaggctgttgagaagtttgatttgatgtaagggcgctgatcctctgatgtgaccgcgacggtggcgagcgctttccattttgagacagagcctacatttgtttgggagagttctgagatgatgcggccggtgtatccgtcattatttgtgccccaatatgtggcgcgggtattgccgttcagatttttgtaaatggtcagctgtacggtgctgccgggccggaagcctttcgtataggtgaattggctttctccttccagataccggacctggccttgtccctttgaaccgactttcatgatcggtttccatacatgataggtgtcactgtactgaagtccgatatcagcctctgtgcctccggtaaaccctgagtaaatataggctgtcccatttgacacctgaatcgagcttggaagctgaattttcgtgacgagaactgagcccgtgctgtgcaggtaggcccttccgccgattcctttgctgagctgggacgccgcttccgccgtattggggctgatcacccccggaatttccgccgtacatgtgccgaatagaacggctgtagtgagcacacccgcaaaaagcccttttttcatcatcatttctcctcctatcatcatagtcagatagagctatcaattcatattataaaaggttttgggaaaaattccataaaagatatacgggcggacgtaaattaaaactattttcctatttatcttgtaaatggatattatttgaactatgatatgttcagcaataccgcataacttaggagaggggataggatagaaatgaaaaagacggcagctgtgcttttgtctttcggtcttgtgttcggatgttcatacggagcggggcagacggcagaagcgaaaacaaaggtaaaaacgtatcaaaactgcaaggcgctgaacaaggtgtataagggcggcgtggccaaatcgtcgaaagtgaaaaacaagggcggcagaacaaagtacaagccgtatgtatcaaaagcgctttacaatgcaaataaaagacttgaccgagataaagactatatcgcatgtgagaaataaaaaaacaagcctctttaaagaggcttgttttttaaatggattcggcggtgacggcggttccgtatccgattaattcggatgtgttctgtcctgcggtcagttcgaaccgcaggccgacgatggcgttcgctccgagctgctccgcctctctgatcagccgctctttcaccgcttttttggagtcttccagcatttcggtatagctttttaattcgccgccgacgacagattttaagcctgcaagcaagtcttttccgatgtgacgggactggacgatactgcttgtcaccaagcctttcacttctgtaatctgttttccggcgacggtttcggtcgttgtcatgatcatgcgtttttcccctttcgtgtatcttaccgctatcttaccatttaagccgccttttcggctgcgctgatttgtttttttctgactgcggcgctgactgcaaacatgacgacaatgttcagaaccagtgcgatgatgcctgtattcatatctttaacgatctgcggaagaaacggaaagagggttccgatggttgattcggtcagcgtaatgaaggccaccgttccgaccccggccgttatgccggcaaaagcgccgtggcttgtgatgaaacgccgcttcggcaggctgaataagagggcggggaaaagctgggtgacaaggctgtagcccattaaaagcaaggtgacgatggtatttccgcctttcagcgtaaaatatacggatatcagcgcgatgacgggtacggcgtattttgcgagccgtgagactttgtcgtcagtcgtgccgggcagaatggctttgtacacatttttggcgaacagcgtgcttgaggccattaatatcattgaaccgggtacaagcgccgtcagaatgcccgccgatccgatcagtccgacaaaccagggatcaaaggttttcacagacagctttaataaggcgagatccgtgtccgccccttttaaaccgggcacctgcagaatcgccgcaaatccggtaaagatgacaaacagcaggacgagctgataaagaggcatgatgatcgcgtttttccgaaacacccgcggatgctccgccgaataggaagcggcaaaagtatggggccacatataaaagccgagggcggtcagcaaaaccgttgagctgaaccaggaaacgctctgtccggtttccggcagcgtgagaaaaccgggttttgcggcgtcaatttgtttgaacatctccgtaaacccgccatagtaatgaatgggcagataaatgcctaaatacaggacgatgcctaaaatcatgatatctttaacgactgatatccacgctgaaccgtggattcctgatatcatcacataaatcgtgatggagacagcgccgatccagacagcggcggagggcggaatctgtccgtatgacgttgctgaaacaattaatccgagccctttcagctgcaggacgagataggggatgagggatgcgatgccgacgagcgatacgagaatgccgaggagcgggctgttgtattttgaaataaaaaaatctgattgcgacatcagtttgtgttgtttggcgtaagtccacacggctggcagaagccaatatgacaaaatgtaggcaaggcagccgtacgcgataatataaaaggcggggcctccttttccgtaagcccatccgcttccgccgaggaatgtaaaggtcgtgtatatttctcccgccattaataaaaagacaaacatcgtgccgaagccgcgtccgcccactgtccattgttcaaggtccatatgttttccttttcgggcccggattccgagatacacacaaaacaggagcacggcggccattacgggaaatgctgcgttcattccgcctcacccgccttgttttctttgtccaatttgtaaacggcggccatcagaacggaagtcagcaccgcccagatgacgacatacgcgagaatgaaaggcattccgaaaacataaggcgtcacccggttggcaaatggaatgccggcgagaattccgaaaaagggcagggcggcgagaacatgaatcagtttcataacattcctccttttcattgaaaacagcgtgtcccgattataaagaaaatcatgtcgaatgtatagtgtgaatagtctgaaatttatcaactgaaaaggaaaagcagtcccggctgctttttaaatggtcgcaagagacaggtaatattctaataaggcggttacctgttcccgtattctcgggttgaaataacggtgtttttcttcatagccgttaatggtgcatatataaagcgtaaatgcttcgtctctttccgcttcgtatattttaattttacgctttcttaactcttttcgaacatcactcaaatccttttgtgctaattttaaagagcagctgataagctgtttatagggttgttttaatttgaacgggcacgaatcaagcgcttcgaggtcccggttcaggatggcagccgccatgggcagaaacagccctttttcgatgagatcgcgggtgccgctccggatgtcaggcataaatactccttctttcttaaaaaaagagaacgtttgttcttattttatactcgcttacacgatatttcaagtcggaaaatctcgtaaacattttcgttttttggagataatgtgtagaataaggatagacaaactcgttaaggagtataaacgttggagcaatttttatcatatttgactgaggaacagctgacggaatggttccaaagctatagagctttcggcccggcggctgcggttgcactgccttttattgaagcgtttcttccgtttttgccgcttgttgtatttgtggtggcgaatacgaatgcatttgggttatgggaaggtttttttctgtcgtggctcggatctgcggcaggatcgatgctgatgttttatgccgtccgccgtttcggacagaaaagagctttcggtttcatccgcaggcatcagaccataaggcggatgatgctctgggttgagcggcacggtttcggtccgctgtttattttactttgcttcccctttacgccgtccgctgcggttcatatcgttgccggcctgtcacgggtcggggcgctgcagtttatatcagcagccgctatggggaaaatggtcatgatttttatgatcagctttatcggatatgatcttcacgcactcatgacacagcctttcaggatggcgggcgccataatggtgatcgcggtgctgtggtatgccgggaagcatatcgaacggcgtttacagatgagaatcagtcagcatgagaaagacggagggagacaggaatcttgaaaaaacgattttggtttatagccggcgtgcttatcgttgttttggccatacaattaaagaatgccatttttattgattataaagtcgaaggaatcagcatgaatccgacctttaaacaaggaaatgagctgatggtcaacaagttttcccatcgttacaaaacgatccgccgtttcgatattgtcctcttcaaaggcccgcaccgcaaagtgctgatcaaacgtgtcatcgggctccccggcgagtcaatcgcatacagggaggatcagctgtatgtgaatggaaaacgggtggcggaaccgtttttaaaaccgttaaagtcatcattgtccgccgggagccatgtgaccggtgattatacgctgaaggaaacgaccgggcgcaaaagcataccgaagggacaatactttgttattggcgacaaccgcatatacagcctcgacagccgtcatttcggtccgattaaggataaagacattgtcggagtcatcagtgaatcagacgccaagtaaacggcgtctttttttcggaaatgattgtaaaaaagcagagggaagactataatgaaaattgttacgcgagaaacaaaaaggaggcgttttattttttggtgattttgttacccgtgtaacaaaaaatatgaaagagggctgatgagatgaaaacacaggctgccattatcgggggaggtccggtcggacttatgcttgcatcagaactggcgctggccggagtgaaaacgactgttattgaacgattgaagaagacggtgccatattccaaagcgcttatcatgcatccgcgcacacttgagctttttgccatgagaggcatattggaacgctttttggaaaaagggacgaaggtgtcttccggccatttttccatgctggatacacggctggatttttctcggctggatacgaagcagaattattcgttaatgctgcctcaggcagaaacggagcggattttggaggagtatgcatcaagtctcggcgcagacatcatccgcggggcggaagcggtggctgtcacccagacggatgacggagtggagacggtgttccgggacgaaagcgggatccgcactcttcacagcttatatgccgcgggtacagacggagcggggagcattgtcaggaaacaggcgggcatcgctttttcgggcactgatgccgacttaacaggaaccctctgtgatgccgctttgaaacatccgcccgaatcttcctttttgtcaacgtgccgcctggagggatcggttgtgattgtccctcttacggacggacttttccgcgtcctcatcgtttctccgcacgctccgcaaaagcggaaggaagagccggtcaccgaaaatgagctgaaagaagacctgcggcggatatgcggcactgatttcggattgggtgatccggtatggacgtcgcggttcggcaatgccgagcgtcaggctgagcagtaccgatcaggccgggtttttgtggccggtgatgcggcgcacattcattttcccgcaggcggccaagggctgaacacggggcttcaggatgccttcaacctcggctggaagctggcggcgcaaatgaaggggaaagcggcgccttatcttctggacagctatcatcaggaaaggcacagcacaggaaaagaagtattgcacaatataaaaacccagataaagctcatggattttaccgagtcggggatggcattaagagaaacgatggccgctttgctggattttcaggagtccaaccgtttattggcgggaaaagtatccgcgcttgatctgcattatgaaccggatgcggagctgccgccgcatatcctgaacggaaaacgcctgccggatatcgaattgacccttcatgacgggcggccggcccggctgtatgattttcttcataagggcgcctttgtgcttttgtcattaagagggagcattcccgccggtattgatacggacagcgtggcagctgtcagggcggagcttgctgaaacacgtgccgattgggatgacgtccacgccgttttcatccggccggacggccacgcggcatgggcagccggcggctcgggacgtgaagcggaagaagctgttctggccggtttggagagatggggattcatctgatacccttttatgcgcctgtgtgattgtttcttgtgtaacaaaacgttatagtaaaagaaacaatcaatacggaagggtgattcagcagttggacagaagacagccagaccatgcaaaacacatgattcttgaagggctgacagatatttttcacgagcaggagaggtgtcaggaggacatcagggcgtcgttggccggacggatggacgaactccgtgaagaaaatggaaaaaaattacagttgactttgacggaaattcacattttgtcgtgtatcggagatcatgaaccgatcaatgtcacgtcaatagcggaaaaaatgaagacgacaaagccgaccgtgtcgagaagctgcgcgaagtttttggaagccggctttctgcgcaggacccggctgagcgacaataaaaaagaagtctatttccggctgactcctgccgggaaagagctgcattctcttcatcatgaatatcatgaattgataaaaaagcggctcttggcgtttttagaccgctatacagatgaagaactgttatttgctgaacggctgttccgtgatctttcagcaaactggcggtctgtaaatggcggcggagagctgttcaaataaaaaacacgcatatggatgcgtgtttttttattcggatcatgttcctctttctgcccggcctctttcaccgtgtgcccgtttcagctgagaaaggtggtgcagcagccgatagaagggcggaagcatggcgatgacgagaacgatccggatgacctgaaccgcgacgacgaaagtcgagtcttcgtgcagggtgatcgaagtcgccgccatctcggcgatcccgccgggagaaaaggcgagaacagatgtaatcatggagatgcccgttaatttagaaaccgcaatcgcgctcagaatcatggcggcgattaatccgacggaagaaataaatccgacggtcagcactctcgtcacaccggtgaacatacttttgtacatttttgatccgattgtggcgccgagaaaaatttgtgacagctggttcgcttccggcggccaccaggccagcatgtctttgcccgccaaggcggacacgccgatttccgcagcagcaacgccaatcatgctgccgagcagccaaggggcgggaaatttcagccgttttgcgcctttgcttgcaagccaggcagccaaaataaatccggccgttaacaagacgggagtaaggcccggatgtgaagctcctgccgaaacggctccggctgatgtctgagctgcaccgttttgtttggtaaataagaaaatgacaagaaacggtattgtcatgacgaccaaaaggacgcgcgtcagctgaataaggcttacaatcgcggtgtttgcgccgacttcctgggcgatacccggcatggcggataaaccgcccggcgccgtgcctacaaagcttgtcatcatgtctgtccggctgaaccgaaagagcacatatccggaaacaagcgccatcacgatagaaaaaatcagcatgaagcctaccggaagccaatgctcccgtaaaaccgacagaacggacaggttcagtttctggccgagttcgatgccgaggatcatttgtcccgcggcaagccatctgcggtgaatccctcttctgtcaggcgccatgaacagccagcggggcctcgtcatggagaggatgcagccggcggccagcgttccgagcatccaggcgatcgacatccctgtaagcgaaagaagaaacccccctgccgcactgatgagaataaaccagatatccgtaaggagatgtttgtctttcttcaatgaaaacccttcttcctgaaacattcatattaaattgttaagctcgttaaccttactattactatagtatagattttgagataaataaataatgaattatttctcataatccattcatttttcttatcgcaaacgcaaaaaaagctccggagatgggtgagtgcaccctactccgaaacctcgcccgcttttcctttccacacaaaggtcaatcccagaccgagaaataaaaccacacctgcgaacagaaacgggaagtgaatattcatatcaaataaaataccgcccagagccgggccgaaaatggtgcccaaactcgtgtatgttgagttcataccggcaacaaacccctgctgatttcctgcgattttcgataaataagtagtcagtgccgggcgcagtaaatcaaacgcaaggaaaatgatgcaggtgacagcgagcacgggcaaaaatcctgacatcaccgtagaaacgaaagccagcacagcgccgatgatcagacaaagctgaatgacttttttctccccgaggaagttgacaagtcttccgaacgcgagtacttgaatgaggaccgccacaatggagctgaacgtaataataatggcgatatcctttggcgtgaagccgaatttatggtttgtaaataagctgaataccgtttcgtaagccgacagtccgaatgccaaaacaaaaacgatgataaaggcgatcaagtagtttggatgaatcgactttttcaaatcttttaagaaagttgattctttgacgctttccagctgctttgcgcgttcttctttagttaacggctctttcagcataaagacagaggaaatcactgcgataaatgcaattcccgccgcaaagaaaaacggcattcgaacgccgtgatcggcaataaatcctcctatgccgggcccgatgataaaccctgtgctgatggcggcagatacatagcccatcgccttcgatctttcctgcaccgtcgtaatatctgcgacatacgctgtaacagcgggcatgataaaagcggcactgatgccccccagcacccttgcgaaatataaaatggagacatgtgtgcccaatccgaaggtcagttcggataatgcgaacaaaaacagtccggcgagaatcatgatttttctgccgaagcggtcaacccatctccccgcaatgggggatgcaattaattgcgcaacggcgaaggcagcgacaaggtatcccattgtgctgcccgtcaagtgcatcacattcataaacagcggcataacgggaatgatcaatccgatgcctaaaaacgcaataaatatattgcttaataagatgatgagtacagccttttgttctctgatcggtttttgcatgttgtttctcctttgtcagctgtcattctgtttatcagcgctgatcgacccgtgaataaacacggagatggcttctttttgcaattcgattctttgctgaatggtatcgtttttatataacacatctaaaccgtagaagacggatagcaggatttttacttttgattcgacatgatgaatggaccagctgccgtcttgattcccctcttctaagatctctctcatcacatcgtcatattcaatatcaattttgttgagccgctttacgacctcctctgacgtaaacgcactcgcataaaactcttcacttgctctcataagcgggtaattgatgctcatccggctgagcagctccgcaaagcccgccagcttttgggcagcatctttcagatcagcttccatttccctccacgtctcgatcatcacgcggtgatcctcttccatgatatgaagaaacagaaactcttttcctttaaaatggtgatatagattgcctttactgatttcggcagcctctaaaatatcccgaatcgatgtttctgaatatcctttttttgcaaataagtcacgcgaagcggatacgagcctgttcttcgtcttttggctctttccggcaccgccttttgtatttgtcacttcacacagatcctttccgcctcattcatatcgttgtcccgcaatgcggggctcggttcgtttgaaaccgaccagttggtttattttattataaagggtttttgctgattatacaatgaagaaggtatccattgtttagagggagtataaaacggctcgaaaagtaaaccccattctctcatgttgaaagaacggggtttgtcagcggtctgaagactcccggcgggggagcgtgatctgcctgaaccgttatttgccgttatttacctcggtgtagcttgtgttcggcgcgtttgataccgttccccctgtatggtggaaaggagagtgggccatatcgtataaaaaccagacggcatgacgctgctcgtcaaatgccgtgcgggcaaataaccgcttcgcttccggatgcaccgctctatcggatgcctgcaaataaaaatcattcgttttctgctcatcataaaacgccgccctcagtccttctctgtatgtgtgcggacaatgctccgtctgtttcggcgtcaactgttttccggtaattgacgtatacagtgaagagaaagcgtgcaggtggcgcacttcttcctctctgatatgttcgattcgtcttctgatttctgcggtcggcgctttttcggctaatattgagtagcaaatcacagcgctgtattcaccgtttatggattttaccagatcctttataagcacagaatcgtcgctgcagatggctgtataatgaaaaaaattctcgtgcattggactcacccccgaatgtttatagggtattatacggcggcagcccgtgacatgtgcggatgtcatttttattcttgatctagcggcgatgtaatatggtcgtcgtatgtgtcgacaaaaagccggccgttgcttccgcgcacagcgtatacgacgtcttccggtttgaggtttctcttgtccaattcttctctcagccatttttccgatacgtggttttcttccagattattcatcaccagccggccgtccataatcagctcaacggcaaagttcttttcatgtccggcaaagatgccgagatcctttcttataacgggcgcaaattccggtttgacctccactgacatgctgccgtttgtttcaatgatggcagtctgaacctgagaaatgtcaaatacgtcatttacacgcagctgctggttcaagtagtcgatggtatagcgcatcgttttcatattatgctcaagtatttttccgttttgaatgataatggtcggtttgcccgcaaagaaacccctggcggttctgtttttcatagaaagatatgcgacaagataaatgatgaccacgaaaatcgtgtaagcactgacagtaaaatgaatcggcagttttgtattaaacgacagatttgccgtgatggcgccgagcgagatggccgcaatgaaatcaaaaagcgtcatctgtgaaatggtttgttttccgagtatccgggcgccgataaacagaatgctgaacgacagaatcgttcgcacaatcacttcgggatattctgacatcatatttaatcctttttttctttaatttggtcaaaaacgatatgttttaaaacagtcatcccgtttttaccagcagatgagattggtcattttcgtcaactttcgataaaatgtagaaagataaaaagagaggggtcttctaatttgggtgttgagtttttagtaggcagatcggggagtgggaaaacgaggctgattatcgacagcattcaagatgaactgcgccgggagccgttcgggaaaccgatcatttttctagtcccggatcaaatgacgtttttaatggaatatgagcttgctaaaacgccggatatcggcggcatgatacgcgctcaagtgttcagtttttcgcgtttggcgtggcgcgtgcttcagcataccgggggcatgaaccgcccgtttgtgacgacgacgggtgtgcagatgcttttaaggaaactgattgaagaacataagcacgagtttaaagtgtatcaaaaagcgagtgacaaaaccgggttcactgagcaggtggaacggatgctgacagagtttaagcggtactgtattgagcctgaagacgtccgccgcatggcggaaagcggaacggcgtcagaatatcgcggagagcggatgctgtctgaaaaacttcatgatttaggcattttatatcagcagatggaaagaagcctcgccggacactatttgcattcagaggactatttgacgctgctcgctcagcagattcctttggcggacgttgtaaaaggcgcccgtgtttacgtcgacggattctatcaatttacgccgcaggaattaagggtgctggagcagctgatcatgcatgctgaacatgtcacattctcgctgacggcggacagcccttcggcggaacaggcaccggatgagctcgatctgttcagaatgacgggaagcacatactataagctttatcagacggcaaaggaattgaatgccgatatttcctgcaaggaactgcatggcacgaagcggcatcagcatgctccggagcttgcctgtatagagtcgcagtacgatgtgcgtcccgccgcggcgtataccggcggacaggaagcttttgccgtcatgcaggcgcaaaacagaagagctgagcttgaaggtattgcccgggaaattcaatcacttgtccgggacggaggataccggtacaaagatatggcgattctcgtccgtcagccggaagattataaagatttgctgaaggaagtgtttgccgattacgggcttccttattttattgacggaaaagcttctatgcagcatcacccgcttattgaattcatccgttcaagcctggatgtcgtgaaggggaactggagatatgaagcggtgttccgctgtgcgaaaaccgaactgttattcccgcttgatcagccggagcagaaaataagagagcaggtcgatcagcttgaaaattactgtatcgcctacggcattaaaggggagcgctggacgagcggcgagcggtttgtatacaggcgcttcgtatcgctcgatgaggatttcgcgcagacggatcaggaaatagagatggaacacatgctgaatgagacgaaagagtggatggccgcgccccttgtccggcttcaaaaccggatgaaaaaggcgaaaacggttcaaagcatggcggaggctctttatctctttttggaagataccgatgttcccctgaagctggaccggaaaaggcagcaggccgaagaggccggaaacatgatcgaagcgcagcagcacggccaggcgtgggacgccgttatccagcttcttgaggagtttgccggcatgatgggtgaagatgaaatatctttggcactgttccagcaaatgcttgaaacgggaacggaatcgcttcatttttctttaattcctcctgcgcttgaccaagtatttgtagggaatatggatctctcaagaatgtacggcacgtcctgcacattcgtcatcggggccaatgacggcgttcttccggcgcgcccggatgaaaacggcgtgctgtctgatgatgaccgggagtggctgaaagcagtcggagtggagctgtcttccgcggggcgtgagcggctgcttgatgagcattttctcatctatatggcgctgtcgagtccgtctgaccgtctttatgtgtcatacccgattgccgatgcggaaggaaaaacgctcctgccgtcaatcgttgtaaacaggcttggcgagctgtttaccgatcatcaggaaaagctgtcagcggctgatcccgagcaggtaagcgaagaagagcagcttcagtatctcgtcaataaacaggtggctcagacatatacggcaagtcagctcaggctgtggacaagagagtacgagatcagtgacgtatggtggagcgcatacaatgtgctgatgaaagagcctgatcaccggcgtgcgaaaaagctgttttcaagcttgtttttccgcaatgaggcgaagcgtcttgaacgccctgtttcgcgccggctttacggcgagcatattaaaggaagcgtctcccggatggaggcgtttaatgcctgccagttctctcattttgcatctcacgggcttcaattaaaagagcggcagtttttcaagctggacgcgccagatatcggccagctgtttcactccagcctgaagctgatttcagaccggcttcgtgagcagaagctggaatggcgcgatctgacgaaagatcagtgccggaatttctcctatgaagcggtggaacggcttgcgccaaagttgcaaaaagagattctgctcagctcaaacagacacttttatgtgaaggaaaaactgcagaagatcgtcacgcgtgtttctggcatattaagcgagcatgcgaaggcgagcggtttcgtcccggtcggtcttgaactcggtttcggcggaagcgggccgctgcctccgctcactttcacgctgaaaaacggctgtacgatggaactcgtcggacggatcgaccgcgtggataaagcggaaagttcaaaaggcctgctgctgagaatcgttgattataaatcaagcgacagggggcttgatctggctgaggtgtattacgggctcgctctgcaaatgctcacatatcttgacttatcgattacacattccgcggattggctcggcatgaaagcgaccccggcaggcgttttgtatttccatattcatgatccgatgattcaggccagtctgccgatggggcttgatgaaatcgagcaggaaatttttaagaaatttaaaatgaaaggccttctcctcggtgaccgggaggcgatcagcctgatggacacgactttggaggaagggcgttcaaatatcgtcaatgccggtttgaaaaaggacggttctttaagatccgactcagccgcggtcagcgaacaggactttcatctgctgacagaccatgtgcggcggacatttgaacaggcgggcgaagcgataacggacggacttgtgtccattaccccgtataagctgaaagataagacgccttgtacgtactgtgcgtttcaatcggtgtgccagtttgatgagtcgcttaaggaaaatgaataccgcagcctgaaagcggaaaaagacggcaccatactggattggctgaagaaggaggcggatgatgatgcaaattcctaaaccgaaagacagcatatggacggatgaccaatggagcgccatcgtttcttccggccgcgatattttggtcgctgccgcagccggatcaggtaaaacggccgtgctcgtggaacggatgatcagaaagataaccgcggaggaagatccggttgatgttgaccggctccttgtggtgacctttacaaacgcctcagcagcggagatgaagcatcggatcgcggaagcattagaaaaagagctcgccaaaaatccgggatctctgcatatcagacggcagctctctctattaaatcgggcgagcatttcgacgcttcactctttctgtctgcaagtgcttaaaaaatattattatatgattgatcttgaccccggttttcggatggctgaccagacggaaggcgaattgctcggagacgaagttcttgatgagctgtttgaagatgaatacgcaaaagggaatcaggcgttttttgagcttgcggacagatatacgacagacaggcatgatcttgatcttcaagaccttgtcaaacgggtgtacgagtattcccggtcgcatcctgacccggaagcgtggctgcaaagctttgtccgcctgtatgacgtgacggaagaaagcaaaatggaagagcttccgttttaccagtatgtgaaagaagatgctgaaatggcgctcttcggggcaaaacaaaagcttgagaaggcgcttgaactgacaaaagcgcccggcgggccggccccgcgcgctgataattttctggatgaccttcagcagatagaagagctgatcagctgccggcatgacttcgatgcgctgtatgaacgggttcccgcagtctcctttaagcgggcgaaggcggtaaagggcgatgaatttgacaaagcgcttttggacgaagcgaccgatttgcgaaacggcgcgaagaaactgatcgaaaaggtaaagaccgattactttacaagaagtccgcaagatcacttaaagagtttaacagatatgaagcctgtcatcgaaacgctcgttcagctcgtgatatcatacggaaaacgatttgaagcggcgaaacaagaaaaatcaattattgatttctcagatttggaacattactgcctggcgattttaactgcggttgatgaagaaggccggcgagtgccgagcgaagcggccgtttattatcaagaccagttccatgaagttctggttgatgaatatcaagatacgaatcttgtgcaagagtctatcctgcagcttgttaaaagcgggaatgaagagacgggaaatctgtttatggtaggcgacgttaaacaatcgatctaccgtttcagacttgctgagccgctgctgtttctcgggaaatataaaaggtttacagaaagcggggaaggcgcggggcagaaaattgacctgaaccaaaatttccgcagccgctccgatattttggacagtacgaatttcttgtttaagcagctgatgggcggaaaaatcggcgaagtggattacgatgaacaggcggcattgaagctcggcgcatcgtatccgccgaatgacgcggcaaaaacggaactgctgctcattgacagcgctgatggcgcaggcagctccgaggatgccgaagactttgaaactgtgcattgggaagcgaaagcgatagccggggagatccgaaagcttgtctcatctccgtttaaggtatatgacggcaaaacaaaaacacaccggaatatccagtaccgggatatcgtaattttgctgcgctccatgccgtgggcgccgcaattaatggaagagctgaaaaaccagggcattccggtgtacgccaatttgacgtcgggttactttgaagccgtggaggtagctgcggcgctttcagtcttgaaggtgattgataatccgtatcaggatattccgcttgcttccgtgctgcgatcgcccatcgtcggctgtgacgaaaatgaacttgcgctgatacgccttgaaaagaaaaaagcgccgttttatgaagcgctgaaagcatatatagcgaacgctgacaggcatgatgacctgtatcaaaaactgagaaccttttatgacagtctgcaaaagtggcggtcattttcgacgaatcattcggtgtctgagctgatttgggaagtataccgcgataccggatattttgactatgcaggcggcatgccaggcggaaagcagcgccaggccaatctgcgcgtcttgtatgaccgggcgcgctcgtacgaagcgacggcgttccgcgggttattccgctttttgcggttcattgaacggatgcaggagcgcggcgatgatctggggacggcccgggcgctcagcgagcaggaggatgtcgttcggctgatgacgattcacagcagcaaaggacttgaatttcccgtcgttttcaccgccggactcggcagaagttttaatatgatggatctcaacaaatcatacctgcttgataaagagctcggtttcggcacgaagtatattcatccggaactcagaatcagctatccgactcttccgcttgtggcgatgaagaaaaagatgcgcagagagctcttatccgaagaattgcgcgtattgtatgtggcgctgaccagagcgaaggaaaagctgtttctcgtcggttcctgcaaaaaccgggaaaaacagctggccaaatggcaggcgcaagcagaccggcccgattggcttctttctgaattcgaccgctatcaggcgtcatcttatttggactttatcgggccggcgctcatccgccaccgtgacatggaagcgcacaggacgccgggactttcctcatctgaggatatcgcgcgcgacccgtcgcgttttcatatccggatgctgcagcaaagtgaattgctggaagagaatccaaaagaacgtgctgaagaaaagagcaaacgtctcaaagcgattcagcagggcgagccgattcctgattcgttttcatttgatgatcaggcgcgccgtctgcttgtatgggaatatccgtaccgagagctgacggctatcagaacgaagcagtcagtttctgagctgaagagaaagcaagaatacgaggatgaatacagcggccgctctctcatcaaaccgtcaggagacacgcttttatacaggcgtcccggttttatgatgaaaaaagggctgactgccgccgaaaaagggacggcgatgcatacggtgatgcagcacataccgctgacgcacgttccgactgccgaagaagcggagcggacggtccggatgctttacgaaaaagagctgctgacagaagaacagcaggaagctattgatatagaagaaattgtccagtttttcggaactgaaatcgggaaagaccttctcggggcgctgcggattgaccgggaagtgccgttcagtatggcgcttccggccggcgaggtgtacaaggatgccgaaacggccggtgaaccgctgctcgtgcaggggattattgactgcctctacgaaactgcggacggtctctatttgctggactataaaacagatcggatagaggggaaattccggaacggatttgaaggcgcggctccgattctgcaaaaaaggtatgaaacacaaatcgaattgtatacaaaagcggttgaacaaattacaaaaacgaaagtgaaagggcgtgcgctctatttcttcgatggaggtcacgttcttacactgtaacaagatccgaagctcctttttggagcggatctttttttctatcaaaaagtgaggtgaatgcggtatgcgcattttacatacagctgactggcacctcggcaaaacgctggaaggcagaagcaggctgagcgagcaggccgaggtattggaagagctgaataccattgtcaaggaagaaaatattgatgcggtcattatggcgggggatgtatttgatacggtcaacccgcctgcgctcgctgaacaattgtattacgaaagtctttccgcgctttctgacggcggaaagcgcccggttgtcgtcattgccggaaaccatgacaatcccgacaggctggcggcggcttctccgttaacaaatgagcgcggcattcatttaatcggctatccgcggacagaacctgtgcatattgaagtgccgtcggcggacgagctgttagccgtagctgcgctggcatatccgtcagaggcgagattaaacgaagtgctttctgatacgtttgaggaaaagcttcttcgcgatcattacgatgtcaaaatcagagaggcgtttgctcacatgtgcggactgtgccgggacgatgccgtgaaaatcgcggcgagccacatttatgtcgcggggggaaaccagaccgattcagagcgtccgattgaagtcgggggcgcttacacagttgccgctgacagcctgccggctgatgcggcttacgtggctctcggccatctccaccgtccgcaaacgatcaagcgcgccaagacggctgcccgttattcaggctctccgctcgcatacagcttttcggaagccggttatgccaaatcggtgacggtggtagaagcgaagcccggcggagaagcgaagtgggaagagattttcctgtcttccggtaaaccgctcgtcaaatggaaagcgcaggggctgagcgaggttcacggctggcttgatgaagggcgtgaccggaatgcctggatcgatcttgatatccatttgacggatcagctttctctcgaggaaattcatcggctgagaaaggcgcatcccggctttatccatatcaggccggtttttgaagaaaaagagaccgaaaatgaccggattgaagtgaaacacacatcaattgaggatcgatttaagaagttttatgaaaaacaaacgggcggcggcgtgccggatgaggagatggtcaagctgtttttagagcttgcgtcagcagatgatgaggaggatgcgacatgaagccgattctgttaacgataaaagggctccacagcttcagggaggaacagaccattgattttgccggactgtccggagccggggtgttcgggattttcgggccgaccggaagcggaaaatcatcaatccttgatgccatgacactcgctttatacggaaaagtggagcgcgccgcaaataatacgcacggcatcctgaatcatgccgaagatcagctcgccgtctcatttacattcgcgcttcaatccggccaccgggtttcctacaaggtcgagcgcgtttttaagagaacggatgaaacgaaagtaaaaaccgccctctgccgcctgattgaaatcaaagacgaacaaacggtgctggccgataaagcgaatgaagtgaacaaaaaggtagaggagcttcttggcctgaccattgacgactttacaagagccgtcgtgctgccgcaaggaaagtttgccgagtttctgtcgcttaaaggcgcggaaagaagacatatgcttcagcgcctgtttaatctggaacagtacggggacaggcttgtcaaaaaattgcggcggcgggcgcaggaagcggcagcgaaaaaaaatgaaatgctggccgaacaatccggcctcggagacgcaggagaagatgcgctgaagcaggctgaacagcagtttcacgaagcgaacgaacggcttgaagaagctgagaagaaacgggtccgggcaaaagagcgctttgagaatcaccaggaaatttggaacctgcagacagaaagagatgaatatgagcgccgggagaaaaagcttgaggaaagacgcccgtacatcacggatttgactgagcgtcttaaagaggcggaaacagctctcgcccttgagccgtacgcagaccgttacacagaagccgtccgccggaagcagcgcgccgaacaggaacacgaactggccaaacggaaatcagaggcggaaaccgtttcatttacccggcaaaatgaagcctatgaagcatggcgggcccataaggccgaacaggagccgaagcttgtaaaggaagaagagctgtatcaaagactttcagccattgaacaaaaactgcttgaagcgaaaaaagaagcggaaaaaacaaatgcggaacacagcaaaaaagaggaagaatacgaagccgcctcgaaacagctggccggagtgaaagaccgcctgacccgcggccaaaacaggcagaatgagctgaaagaagagctgaaagcagttcaagtgaccgccgatgaacggaaaaaatgccagaccgccgcacagctggcggcaggctttcagcagacacaggaacaaatcacgaaagaacgggccaatctgacaacgcagctgaaaaacgtggagaagctgaacggagaaagcgagtcgctcacagcgaaagcgaaaacggaagaggaagatgttacgcacgcttatcaaacgcttcaaaccgtttaccatatggtctgtgaaacggaacgttcactgaaagccgcagccgaacgggctgacaaaacgcaagccgatctccgcaggcgctcagaggaagcgagaacggctgcattaacaaaagaattatcggaaaaactaatcgaaggaaagccttgtcctgtatgcggctcgacgcagcatgaccgcccgcgttccgctcatgaaacattctcgcctgatacggctgtacaggaacagctgcagcaggttgaagcgctgctttctgaggcggcggctctttctcaggaagtgctgacagccaaggttgcattagaagaacagtcggggcgttttaccgaagaatgtccgtttctgcaaagcgcccgggttccggagctggaagccgcttcttccatcagcggacgcccgcttgatgaagcgttcagcgccgtccgcttggaatggaaacaaatgaaacaggatatgctgtcggtaaaagagaaggtcacaagactgatcagcgcgcatcagcagacggtgaaacaagctgagcagcttgccgaacgaatccgctacgaggaaaaagaagccggccgtctcagacattcattagaagagcttgaatcgctgtcagaaagccgattgaatcagtacaacgaagtctgcggtgatattccgccaaaccggattgacgcctggcaggcttcggtagatgagaaggacaggcaggcagaagaatgtgagaagcgcattgaaacaagcatcgcattcctcaaggaacatgaagaggagaaagaacgcctgcaggagatgaagcatcggcttgaacgggaacggctcgagcttcactatgcgtctgagcgcctgcagcaggtgattgacgggtatgaacaagagctcggaacagcagctgaagaaacatcaatttccgcaaagcttgaagcggtgcggcaggaattacagctgttaaaatcgaaagaacagtccctattcgacgcgctgaagcaggcgcagcaatcactgaatgacgcaaaaggccgggaatccgggagtctcatgtcactcagggatgctgagacctcccttgagaaagcgcaaaacgactggcgcgtgaggtcaaaagacaccgggtttgccgacccggaccaagtcaaaaaaagtctgcttccgcaagggcgtgcagaggaaatgaaaaaagaaatagatgagttcttggacacctcaaaacagctatcggcaaatatcagccgtgttactgataaattagccgagcgccggatatcggaggaagaatggacagcatccgtttctctgctgaagcaggcagaggctgagtcaggcgccgccatggaggaaaaaggagcgcaggcaaaagccttcgcggttatgcaaaaacagcataagcgctttaaagagattgaagccgaactgaaaagctggcagacacagattgacaggcttgataagctccagtctgtatgtaaaggcaatacattcgtcgaatttttagcggaagaacagctggaaagcgtggctcgagacgcctctgcccgtctcggagctttgacaaggcagcggtatgccatattagtcgattcagaaggcggtttcgtcatgcgtgatgacgcgaacggaggcgtcaaacggcccgtatcaagcctttccggcggagagacgtttctgacatcgctgtcgcttgcgcttgccttgtccgcccagattcagctgcgggggcaatacccgctgcaattctttttcttagatgaaggatttggaactcttgaccaagggctcttagacaccgttgtcacagcgctcgaaaagctgcaatcggacaacttatccgtcggagtgatcagccatgtgcaggagctgagagcgcgtctgccgaaaaaattaatcgttcatccgtccgaaccgggcgggaaaggcacccgggtcacattggagatcatgtagaaaggagaaggaatcatggccgattctgccgagggcacatgtgaattatgcggccgccatcatgtgcggctgacggagcaccacttaacgcctaaggaagaaggcgggacattccttccgaccgcaatgctctgcatcccttgtcataaacaggttcacgcgctctatacgaatcaggagcttgcggcaaggctcgcgggaatagaagagctgcggcgtgacccgaaactcgcgcggtttgtgaaatggatcagaaaacagccgccggaaaagcttgtaaaaacaaaaaaagcaaatgaacgaaaataacgctgaaccaaaagcagccctcttctgaaagagcgctgctttttaggcgtttccgaccacattttgatcgctgacatcggggtctatatagtttgtcgcattgacaacgttgtttaataacaggaaatctccggtattgcctgctcccgaaccgagcgcagatttagaagagctttttggagaaaggtaaaaggaatcaccaaagtttacgactccgcccgatatggaattgatagctataggtccggtaattgctggcataaacgacaccctttatagaagtctcaccgtcattatatgtcagggctgctgtgattgtgagcttgacgtgaagatctgcctaatatgtttcagccgcgaatctcccagaacgatcgacgtcgatccgatttgaaccacggacgctgacgataccccttgaactttcacattccttacccgaattgaagggttttcatggcagaatgcgctttggactcccgtttccggtaacggcatgacggccggctgccgaaaaatctggtattcttttttgttaaatgagccttcatcatctctgtatacagcaagactacgctgatcggccaatactttgatccgcatattgatttcattcgtatcgcctgcttgaaaaacactcgcaatcccgactgaattgattttggcgttccggaggcgtgaaatgcgctttaacattattccggcgccagcggcacataaggcccgataataagagattccggaggcgtgtcaaagatggaagacagatagacggaatcggtgtcgccgattaataataaggaagaactggatacaccggtagaccggatgtcgccgacttcaatattccggttaatcactgtaaaaatcatgacggatcatcacctttcatttcaccaggtatgtgcttaataaagtgctcgacggccctgacaatatcacgcttcacatgttcggcaatctgttcggcatattgcgcgggcgccgtattttcttctttcgggacatgggacagataatactgaatccggctgtccatctgctttctgatatcttcaataatatgatatttgttcgtttcgtccagcctgctctcatactgagtttcgagctgttctaaaagcgcggggatttcttcattcaggtacatatcgacgttttggcggatttgctgcatttgctggcccgcctgttcctgctgcatcattccgacctgcggagatgtctggccgacttcgaagttttgcacggcattcggatcagtcggattcaatccgatattcagcgttccttccagccgttcaattttcagctgatcaaatttatactcgagccgatcgattcttgtagaaggctgctgcttcagcgttgaaatttcattttggaattctttcagctgccgttcgagctcctgaatctgctgcgcctgctgctggacgaaagaatttaaattctgcaggtaggatgaaacggattgatcatacatgacattcacctcgcgtctcgtttccttcattaaaactaccggcttggcggctggagcggtacaaatgatgaggtgccgggacctccccctgttgttacagtctgctgccccgcggtgacaggcggcgccggctcaacataactccctgtgttgtacagattggaaagagatttaattgaaccggcgcttccgatttgcagtatggaggaattgctgacagattctacacgcatgtaattgatatggatcgactgattgacgtaaaaattcatacggcgcctcctttatgcgtttcctgccatcggctgatcgattacatcattatcgtacacattcgttgaattcctgtaattcgtcagtgtgagattgtctccggtattgaagctgcccgctccggcaaatgtcttaacctctgcttttggagaaatggtgatgcagtcgcctatatgaacgactccgctcgtaccgacggcattaattttaaacgctccgacaattgcgggcatacgagcacatcctttttctgaagattttcatgactgcactccaggagcttatctgggctgcctgcctaaaatagcttatgacaaatgcacatttttgtgagcggaaaaaactttagacgtaaaaacaccggcgctttacgcatgccgggtcttatacataaatgatacagatttatatacatatcacgtttatgagaaagcctctttttttcctgcggtgcggctgtgctcaatctgtgcggccgggttcagcccgctgtctttcgtttgttggatgagcccgccccggcacccgtttaaaaggctgtccagctcctggctgcacctgatggtctccgttgcattgattccgaatttttgcgctgtctcgaataaagttaatcttttttcttcaattttgttcatcgtgtgatctccaattctcgattattttggaaaacataggatgataatagtataacccattttggccaagaaggttttatttcgtcaatatgactaaaaaagtgacaatttttgatactcttttacacttattttcagcctgtttaaaagaggaatttcccgcccggaggaagaatacataaaggaatgccagatttaaaaatgatgggggattaacatgaaatttgcgacaggggaactgaacagccgaacatttgtcggtctgatcattgatgatgacaaaatcttagatctgcaaaaggctgaaaaaaaattgtttgaacttgagacgattccgggttcgctgatcgagtgcattcaaaaaggagataagtttgtcgcgcatgccggacagcttgcggaatgggcgaaaaaaccgaatgatgagtcgggttcatttatgtatgcgctgtctgacgtaaagctttgcgcgcctattccgagaccttcaaagaacgtgatctgcatcgggaaaaattatcgtgatcatgctgttgaaatggggagtgaggctgatataccggagcatcccatggtttttacgaaagcccccgctgccgttacaggacacggagaaacagtggacagccacttggacgtaacggagcagcttgattatgaaggggagcttgcggtcatcatatcaaaaagcggatcgcacatctccaaagaacatgcgcttgatcatatattcggctatacaattgtaaatgatataacagcgcgcgatctgcagaagaaacataaacagttttttatcggcaaaagcctcgatacgacatgcccgatgggcccggtcattgtacataagtcggccgtcagtgatccgcaaagcctgaaagttgaaacgcgggtgaacggagaactgcgccaatcaggatcaacgggtgacatgatttttccgatagctgaattaatcgaaacgctgtcaaaaggaatgacgcttgaagccggtgacattatagcgacggggacgccatccggtgtcggaaaagggtttaagccgccgaaatttttaaagccgggggaccgcattgacattacaattgaaccgatcggcacgctgtcgaaccaaatcggataattgtgtgtctttcgcacgattgataatgctccgatcggcttgttgtggtaccataagtgaggcagattgatctgatagggggaattgaacataatgacacattggcatattacttcatgggtcgttgcgcttatcctggtatttgtcagctacgggctgtacggttccggaaaagcgaagggcgcaaaaattacgcatatgattctgcgcttattctacattattattattctgaccggagctgagctttttgtccgttttgcgaattggaacggagagtacgccggaaaaatgctgctcggcatcattaccatcggactgatggaaatgctcgtcatccgcaagaaaaaaggcaaatcaaccggcggactgtggatcggttttattatcgtgctcgtcctgacggtgctgctcggcctacacttgccgatcggctttcacgtattttaatcaatcgcttgaaaaacccggatgcatccgggtttttttagtcgcgcaactgtgccgctgaatgagaaatgccgtggcagggggatgttgatgaggcgaagaagatgtgcaggatgccaaaagcgtcaatcactctcgttaccgcaaaagctgcggctgtgaagggtaatagcaaacgccgggcgtcaatcagcgtgaaaaacaaagctgaatacatcaggcggcacctatttaaaaggtgccgcctgtttgttacgcggtgccgtcttgtcttgccgctgaatacataatggagcgccgcccgtcagatgccgtccattcaaatctgtcgtgtttacccgagctgccgcggtgatgctgcagggcgcattgtgcgtcatccgccgagaagtgataaaacgaaacgccttcaccggaaaacagcgcctgattgtaggaaaatacgcaatcatatacagacaggccgaacccgtgaagatggctgagaaacagcagaaacgtttcatcgtccagcgaatcgagcaaggttaacagcggccgtttgaccgccttttcataacggatttcttccccgccgagcagggggatggtgtctgcgccgatttcggccgcaccgccgcaaatccgtgccggctgccatctgccgccgcgtttcatcaatacgtctgcgttacctagactgtctgccagcaggatatcgccttcatcgttttcgacgaggcagatgccgtcctctatcatcagggtgccgcgcccccatttgtttttttctgagaaaagctgttttcgtttcataaccgtgccggtctcctttgtttgtttcttctcttccgttctttccaaatcgggcttgtctcatacaactcttagtgggacaaatcaactatctgcgtttctttgcataaactgggtaaagtgctgatagaaacgaatttgataccgacagaaacgggattggagctgatatcacatgtgtggaattgcgggttgggtcgattttcaaaagcagctcgtccaagagaaacatattatgaacaatatgatagacactctttcaaaacgagggcctgatgattcaaacgtctggggagagccccatgttttattcggacataaaagactttcggtcgttgacattgaaggcggccgccagccgatggcctgcacgcatcaagaggaaacgtacaccatcatttataatggagagctgtataacacggaggaattgcggaaggagcttcaggcgaggggccaccgttttgagaggacctctgatacagaagtgctgctgcacagctatattgagtggcgggaggagtgcgtggaccgcttgaacggtattttcgcttttgccatctgggatgagaagcgcaagcggctgttcggggcaagagaccggctcggcgtcaaaccgtttttttataaagaacacggctcttcctttctgtttgggtcggaattgaaagccattcttgctcatcctgatgtgaaagcccgcacagacagcggcggacttgcggaagtattcggactcgggccgtccagaactccgggctgcggggtgtttaaaggaattcacgaggtgcgtcccgcccatgcgttcactttctcaaaggacggtttgtccatatggcgttattggaatgtaaagagcgaaaagcatacagacagcttcgatgaaaccgcggctcacattcggtacttatttcaggatgcagtgacacgccagctcgtatctgacgtgccggtttgcacgtttttatcaggggggcttgattcgagcgcgataaccgcgatagccgccgctcattttgagaaacaaggcagagatccccttcatacttattccattgattatgaggagaacagcaaattttttaaagcgagcgcctttcagccgaatgatgacggcccgtggatcgataaaatgacaaatgcattcggcacacagcatcataagtgcgtgattacgcaggatcagctggttgaacatctggaggaatccgttctcgtcagagacctgccgggcatggctgatgttgattcctcgctattatggttctgccgggaaattagaaaagattttgtcgtgagcctttccggagaatgcgcggacgaaattttcggcggatatccgtggtttcacaccgcggcagaagaagacggatttccttggatgaggtcgactgaggagaggatcacgctcttggatgaaaagtggcaaaaacggctgaatcttagagaatacgtgaatgcgagatatgaagaaaccattgcggaaacgccgctgttagacggtgagacgggaacagataaagcgagacggcagctgttctacttaaatatgctttggtttatgacaaatctgctcgaccgcaaagaccgcatgagcatgggcgcaagtcttgaagtacgggtgccgttcgccgaccacagacttgtggaatacgtttggaatattccttgggaaatgaaaatgcatggcagccgggaaaaaggcatattgcgaaaagcgcttgaaggactgcttcctgaagatattttgtaccgcaaaaaaagcccttatccgaaaacacatcacccgaaatacacgcagggggtcacagaatggctgaaaacgattttacaacagaaagattccgtgctccacaccctgcttgacagaaagaagctggaaatgctgctggagacagaaggttcatcttttcaggttccgtggttcggccagctgatgaaaggcccgcagctgatcgcccatcttgcccagatccatacatggtttgaggcgtaccgtatcgatatagaagaataacagtgccgcgaccggtttccgctgaaggatatcggtctttttattgtgaaacatatggtacactaaaaaacagaggagtgataccatgaccgaatacgaaacatgcgcccagcttgccgaggcgcactttcctttatataaacggactttctcatccctgccgccaaaaaacaggcgggccgcatgggcggtgcttgctttgtttcacgaagctgaccggcttgatgtgcaggaacttggaggatttgaacaggcggcacaagactttctgaacggggcacgcgccgacggctttttgtgggaggcgctcaccgatgtgcggcagcaatttgcgcttgaagaagagccgttacgtgagtttatcgccggccaaatctctgacagagaaaaagtagcgtatcaagagtttgatgacctgctgatgtacgcgggccaaacaggcggagccctcggcctgcttctgctgccggtttgtgcgcgccggaaccaagagaaactccgccatgcagccgtttcattaggagcagccattcagctgacccgggtgcttctgggggtccatacggatgagcgggcgaaaaagcgactcccgcgccaggtgatgaagcaattcggctatacggaagaagagctggagagccataccgtcaacaaagcttttatgaatgtatgggagtacatcgcattcgaggctgaggcgtatttcgaggaggcgtctgaagagctggagctgtttccgttatactcaaggcccgccgttaccggtttagcggcacattatcggtcagagctcggtgacatgagacaacggctttcgcaagcataaaaaaacgcccggcttcataacgaagcttcgggcgtttatgcaatccctttttgaatccaaatccgcgaccgccatcttctgtacataagaatgcctctgacccattcatccgcgataaatgaaatccagatgcccataagccctaatccgaaatggatgccgaacagataagcgagaggcagtccgataccccacatggaaatcattgccatgtagacggggaattttgcatctccggcagcccgcagcgagttgatgataatgacattaaatgaacggccgggctcaagaatgatcgtcatcgcgatcagcatgctcgccgtcgcaataatgtcaggactgcttgtgaaaattccgatcagctgctttgaaaacaaggtcatgatcacggatgtcaaagcggcaatgccaagcgcccagtacagacttttcatgcagcggtcataagcctcgtcaaaccgtttggcgccgatatatctgccgatcaaaatctgtgtgccctggctgatcgccgttccgaacagcaggataaacatggtgatgttttgcgtataaacctttgttgtaagtgcctgagcgcccataatagcgataaaataagtgacaaccatttgtgaaatgttgtaagacagctgttcgccggcagacggaatcccgattttcaggagtttccgcaagtgctctttatggacgtgaaaaatcttttgccatgtcagaccgagtccgatgcgttttttgacgatcacaatcatcgcgatcagcccgatgatccgcgcaaaggacgttgacatcgcaacaccggcgacgcctaacaccggaaggccgagcggcccgaaaatgacaagaaagtttccggcaatatttaaaatattcatcccgatcgtaacgaacatcgtatccttcgtatgaccgtagctttttaaaatggcgctgaacgtcataatcaaagcctgaatgaaggacagcccgccgaccacctgcaaaaagactttggcatccggcatcaattcattggaaagacccatcacatgaagcagcggaacggccgcaaaaaatatggcggcgctgatggcgagactgatgacaaagttcgctcctattgatacataagccacttcctgcgcctcttttttctgtttagatcctaaaaactgtgaaatcacaattgtcgtacccgttgcgataaagctgaacatcacgataattaaatttaaaatctgattgctgacacccacggccgccacactgttgtcggagtattggctaagcataagagtgtcggcgtttcccataaacatatataatgaaacctcaataaatatcggccaagtcagcgcgtataatgagagtttgtgatcagaggattgtttgaatgcagcccgttttaaaatcgcttgtttcatttcttttaacccctttcctgacaaaatcaacgtttaaaagtgtacctccattttcttataataaaaagggagagaaacgaaacttcttgcaaaaatccgacttaaaaaggagggccgaaaatatgtcctttctcgagttcacagttcctccgttcccggtctttatcgctgcgggagaaggagtgttcaaaaaaggcgaaacccatgtgagacgggtcttcccggtgtttgatctgctgtatgtgaaagaaggcgtcctctacattacagaagacgaaaacgccttttccgttgaagcgggagaatatattctgctttctcccgggcttgaacattacgggacaaaaggcagtgaagaaacgacatcctattcgtggcttcattttgagggagcggcttatgaggtgacggaaacaaccgggaacaattggtcggagctgaggcgaaaaaaagggagctttgaagagccgtcccgctaccgcctgtccctgccgcaaaaagggaaggtgagacgcccgcagtttatggccgggcaattcagtgtgctgacaaatgacagcgccgagaactccgatctgccgctcagaaagcagattctgtttgaagagctgctgctccatcttcagaaagaagcgttccaaatcccgtccgcaaaggaaagagtcgcatgggaggccgcccggtacctgcaggagcactatcaggagaaaacaaccatcaaagcgctctcttcggctcttcattacaaccaagactacgtgacccgctgtatgcagcaggtgctcggcgtcacgcccggccagtatacgaacaaagtcagaatgacggaggcgaaacgtcttttgtccgcaaccaatgacaaaatgggggcgatcgcggacgccatcggtatggaggacccaacctatttttccaaactgtttaaacagattgaaggcatttcgccgcttgaataccgcaaattcgtaagccggaaaacggactgacctaaaaccagagaacaaaagagggatcagtaagccatgaaaatgacaatttacgatgtggccgaaaaagcgggcgtctccagctatatcggattatgatagattcgaagtaaaaaagcaaaggcccgggaggcctttgcttttttatgattcgtatgagaaaaaaatgtagtcagtcggcacgcctttatagcccatttggtgaagcatcgcggtgatattgccgcgatggtatgtgccgtgattcacaacatgccggatcacatcggcatatgtcgtctgaagcgtccccaggcgcggatgagaaatagagatcggaccttccgggttctccatttcttttaaaaattcgttgaattctttgtccagttcagtcattctatgttcaatcgcctcaaaatctccgtcaagcttttcaaattgatcaaactgcgagacgatttgttcgaaagtttctccgtaaagcacgtgaagccaaatgtaatcagcccggtatatatgcacaagcacggcgttcacagtcggaaaaacacttttcagtttctgctgtaagctgaccgcgggcagcgtcttcagatgctgaataacttgctcatttgcccatctgtggtagtgatacagctttaaaatgtctgacattccaattccccctcttccttccggtacattcaacatggcctggccgaattccttttatcgaaacaaaagcgccgcaaaataaaaagcagcaccccacatcaccaatgccgagcatttattcaggatgccgcccgccgtatcgtttaataaaagatcacgtcacaatggctccgagcgcttctgcgaatgtaacggcatgcgccggagagatgcggcatcctttcagcttctcaagtgagacgtgcagatgatcaaatgtgcacgtgctgatatccatattaaaaagagacgtgccgataaaatttgagccgttcaaatcacaggcgtcaagatcagtgtattcaagaacggcatcattccactcgctttctgtaagagcgcacgtgtcaaaccggacatgcttcatattggaatagctgaaggagctgtaatttgcgaggcagtcttcaaaccgtacatgacgcatggcggaatccgccagattcaagccgagaagttttgaatgctgaaacgccgttctatggatgatgcttccgctgaaatcagcgtttgagacatcacatttgtcaaacaggacatccgtacattccatatgtctgaaagagacatccgtaaaaacggtgtttctgaaaatgactttttcggcgcgcaggccgtccagtttgctgtttacgacggcgttttctatggcgacttcttttatgaggtcgtcctgaagcgcttctgtgaaagaaagcaccggcaattctttcgggattttcggtttttggatcgtattcatctcatacttccttttctgaattaatagctgaaaacggcaattgacagatatcgttctgcctgccatccttgctgttgtgtaatgtacaaagggtattaaaaaagcgggagggcgtcaatagtaccgcatataaaagcaggcgtgacattcaaggtaatgcccttagagacatgtccccaagggcatttgtctgtttcaggcgagttctttatacatgatcacatgcgggccgatgccgggtatgtcaaaggggctgcccgtgcttttccagccgagcttttcgtaatatccctttacgtgacatctggcgttgcaccagacaagcgccgcccccatatctgccagttttcgttctgcataggcgattaacgtgcttcccgctttttgcgtccggtattcctcaagcgtcgccatgccgcgcagctgataggcgggcgctgcctgtaaagcctgctggttctgcgggtagaaagaagcgatgctgatcaatgtcccgtcgtaaaaacctccgagatgaaaggctcctttgacgctgtcctgatcatatttacaatcctcaatcgtctgatgggggcgcagcacgctgtgtctgatcgcgtatgtgtcttctgcggtgatgggttttacttcaaccatgaaaaaatcctcctttgcttgattctttttctgtatcgtaccatgaaaaagccgcctgtcatatcaggcggcctcttccgcgttaatgcaaatatacatcagcccgcttttcatccttttgcttaatataagctgcaagctctgacgtcaaatcagaacggagaaacggggtgattaaataaattccgttaaacagttcgcacgccgtgtcgagaagcgacttggcgatggcgaggccttcggctttctgcttccgcttgtcttcgccggcgagcgccattttttcgcggatgctgtctgacagcttaatgcccgggatttcatgatggatgaactctgcgttgcggctgctcgttaacggcatgattccgatatacaccggtgttttgagatgcttcgtttcatgatgaatgtcaatgagctgctgctccgagtagacaggctgggacacgaagtagtcagctccgcactctatttttttctccagccgttttactgccttatcaagatggcggacattcggattaaatgctccggctacggaaaagttcgttttcttgccgagcggtttccctgataaagaaatgccctcgttgaattgtttaatcagcctgatcaagtcaaaggacgttaaatcatagacggaggtagcccccggaaagtcgccgatttttgaaggatcacccgtgatggctaaaatgtcggtgagcccgagcgtatccagccccattaaatgtgactgaaggccgatgatgttgcggtctctgcatgtaatgtgaacgagagaacggatatcaaggcgctctttcagcaatgaaccgcaggctgcattgctgatccgcggtgtcgccaatgaattgtcggcgagcgtcagcgcttctatgccggtttcttttaattcagtcgccgcttgcagaaatttgtcaaaattcaattttttcggcggatcaagctctacgataattgaccgtttttgagcggcgatttcgtttaaacccggctcggtccgttcgttgcggactgagatgacttcttcttcccgtctgattttcacttctttctcagtgacaggagaaagtccttggaccgcttcggccatggctctgatatggttgggcgtcgtgccgcagcagccgccgataatgcgcgcgccctgagtgcggaactgtacggcgctctcccggaaataggcatcgtccgtatcataaacaagccggccttcttctaaagacggaaggctgctgttcggatagaccgataaataagcgtcactgaaaatcggcacttcggtgagcgcttcaatcatgtggtacgggccgagccggcaattgattcccgttatgtcagcgccgagatcggcaattgacctgagggcttcccgaagcggcgttccgtcctgcagcacgccctgttcgtgcatggatacgttcagcataatcggaagttccgtttcttttctcgcgatcttcagcacttcgcgcgcctcttctaaatcatagtatgtttccagaagcagaccgtccggctcttcgtgcagcaataaataaagctgctcccgaaagctgcgtttaatctcctccaggctgtaggcgtttttgttaaaggtgcggatgccgcccatcgttcccaatacataagcgccgtctgaggaagcgcgcgcgattctgaccgcctcctgattgatttttttcgtttcatcctcaagtccgtatcttgagagcttaataaaattcgcgccgtacgtatttgtctggatgatatctgccccggcttccacgtaagccttatgtatccgcttgatttcttcgggctttgatacgttcagttcttcaaaacatctgtcaatgccgtaggaatagaggagagtgcccatcgcgccgtctccgattaaaacccgttcttttaagtcttgtaatagtcccattgtttgcctccttcgtcacattcagcaaggaaaaaagagaaataaaaaaagtcttcttaagaagaagactttgtaatcatttgtctctcttcttatcttccaagctgtttttagcttgctggatttagcaccttggtcatggtttgggtaaaccactacaccggttgctgaagcgtcgtcgggccagtccctcggcttctcttgataagaacgttcatgtaattgtcatgggtttccaaaacttaactgtgaaaatccctttctccaaatttaccgaaaatagagacaataatcaataggaatcacataatttatctaaaattaataaattgaacgtcaatcggcaggtctgctccgcggacggctgcaataatctgctgcagatcatctttattttttccggtgacgcgcacttggtcgtcctgaatctgcgacttgaccttcaagccggagtttttaatcaccgcgttgatttttttggcgttgtctttatcaatgccctgtacaagcttcgcgcgctggcgcaccgtgcctcccgatgcattttcgattttgccgtattcaatgtttttcgtcggcacgtctcgtttgatcagcttgccgctcagcacatctttgagctgattcagtttaaactcgtcatcagaaatcaggacgagttcttccttttctaaagttacatcgcttttcgatcctttaaagtcatagcgcgtgccgatttctttcagcgtcatctgaatcgcattctgcacttcgggaaattcaactttggatacaatatcaaaagaactttcttttgccatgagaaaacctcctataacatttcacttatgagttgattatagtagaataaagagaaatgtccaacagcataaagcatgaatttatgcatgttggaaaaaatgagaaaaacatcagcctcatacgggcgaatcaggaaggacgataacatgagaccagggcagcagctcacgcttagtatagatcaccaaaccgatttcggttattttttaaccgacggcgaggatacggttcttttacataacagtgaaatcacagaggatatcgaagacagagatgaagtggacgtatttatttacgtcgatcatcaggaaagactcgcggcgacgatgaaaaagccgctcatcagcttttatgactacggatgggtggaagtgacggacgctgtggaagatatgggcgtattcgtcgacgtcggtctgtcaaaagacgcgctcgtcgcaacggagcacctgcctccgtacaaatccgtctggccgcaaaaaggagacagactgtattgcatgctgaaggtgacaagccgcgggcgcatgtttgccaagccggcgcccgaggatatcatcagtgaattatttacggatgcagaggaagacgtcatgaataaagacctgacgggtacggtgtacagactgattgcatcaggctcttttctgattaccgatgaaggcatccgcgcgtttattcacccttcagaaagaaaagaagagccgagactcggcagccgcgtgacagggcgtgtcatcgaggtgaaggaagacggctccgtcaacatgtccctgctgccgagaaagcaggatgcgctttcggttgacgcggaagaaattctgacctatctgagatcaagaaacggcgcgatgccttacggagacaaaagccatcctgacgatatccgcgaacggtttcatttaagcaaagccgcctttaagcgggcgctcgggcatctgatgaaaaacggcaaggtctatcaggaagacggctggacatacgaaaaacaataaattttctgcaaaaacatcggtgaaccaaaaccgatgttttttattttctcaaaagctcctatgaccctcatttgtttaacaccatgccgaacatacatattttattgaaataaaatattctgacatccgaaccgatatataactatagaaaaaaataaaaggagagtttcaatgagaaaaatggcgatatttgcggctgtactgctgattgcgctcagcacggcgggatgtgccggcaaatctgaggaaacagcggccgaaaaaacgaaaacaatcggtatcatgctgacagacaacggcctcggcgaccaatcatttaatgattcaggctttcaaggtttgatgaaagcaagagacgagctcggcatcacatttgattatcgggaaataaaagacaccggtacatacgaaaaaggactgacccagcttgtccgggaaggcaatgatcttgtggtggggctcggttacagcatgcaggcggatttagaaaaggtcgccaaaaaatatccgaagcagcggtttgtgctgattgattccgtatcagacctggataatgtcacctccgtcacgtttaaagaagatgaaggaagctgcttagccggagcgctggcggctatgacgagcaaaaccggcacgatcggatttatcggcggttcagatgccgacgtcattaaacggtttaagaaaggctatctgaaaggcgcggaatcagtcaaaccgaaaatccgcgtgctgtcggacatcagcggtacgtttgacgatgataagctcgggaagcgcatcgcccaaaacatgatccgaaaaaaagccgatgtcctgtttacggcggccggcttcacgggtgtcggcgcactgaaagaagcggaggcgcaaaaagtatacgccatcggtgttgacagcgatcaatattacaccgccgagcacgccgttatctcttctttagtgaaaaacgtcgaccatgtcatctatgaattggcgaaagatttaaaagacaacaaggagatcaaaagcggtgagatcgtttacggactgaaggaaaacggcatggacttagccaagatcagagttgtcaaaaacgcaggcgggctgacgaaaaagatcacggatatgaaaaacagtctgattgaaaaaggaggcgatctgaagtgacattacggacaaggctgctcgttaacgcagccgttacgatgatttgcttcgccgccgtcatcggctttaccatcgtaaacatgatgaagattcaggcttcaaatgaagatgaagtggacgcgctgttaaacgtccaggaagcaaaagctgaccttaatacgttaaaagaaagcatcaccggctattccaatacgctcgcagacgcccagaaagaagatgtgcgaagctatatgaaaagcagctcggacaaactggcggcgctcaaaaaaacgatgacggacggtgcagacaaagccgcttatgacaaactcgccaaaaaatacaaatcatggcaggcggaggcggacgctgctcttgattcgaaaagcccggctgaagcgacaaggacggcggcccgcatcaacggtcttctgaatgatatttatatgctgaatctgaaaagccgggatcactatgaagacatgcagaagcagacggctgaccagattcagtttatcgtttacagcgcagccgtgctgaccatcgtgatacttgccgtcaccgtcatatcttccatcaggctgacgaagagaattgcagggccgatccgccgcatggctgaaaatgcccgtcgtattgcaggaggaaaccttgctgttgaaatgcttgattataaagggaaggacgaactgaaagagctgaatgactcattcggaatgatggctgaacagctccgcaccttaattcaggcgatcggagaggtcggccgtgaagtcgagactttcgcggaaggtttgacgaaggaaaaccagacgctgaaggacatgaccgagcaggtgtccgtgtcgacggaagaaatggcgcaaggctcccaaaccatttcagaagatctgcagcatgcggtgcaattcattgaacaaatggatgaacattcaaaggcgaacgccgaacgttcaaaacaaacgacgagaagcagcgaagagacgattgcggcggtggctgcggggcgcggtgctttagccgagaccaagcaagccattgataaaagcaatgagacatcaaaagagatttccgaagccgccgatctcttcatagagcatgcggcaggcatcagtatgatggcgcagaccgtttctgacattgcgggccagaccaatctgctgtcattaaacgccgcaatcgaggcggccagagcaggcgaggccggaaaaggatttgccgtcgttgccgaggagatacggaagctcgcagacggatcagccaaagcgaccgcgcagattttcgatatggtaaagcaaattgaagacggcatcacatctattaccggagctgtcacgaccggcgtcgctttagcggacagacagcaggagctgatggagaaaacgtcagaatcattcgtccatattgaacaaaaagccgcccatattaaagcggagcttactcaattggacggacggatcatcgaatcgaaacagcttggtgagcaagtgctgcatcatgccgaaagcatcagcgccgtcgttcaggaaacggctgcgggaagcgaagagatttctgcctccgcgcttgagcagctgtcttcttttcataaaatggcggaaagcgtcaataatctggtgagcctgacagagcggttaaacgatcaggtccgccggtttactttgtaacgggcttatgccccgccccctgatttttgcagcctgacatgagtaacttctgaatgaaacacaaatactgaatatacttgtgtttatatttattttttttcgtgaaaggtgaaaaaagaagggaggaatcgggatgaatgaacaaattccgcatgataagggtcttgataatagtctggctttattacgcgatggatatgtatttgtgaaaaacagagcggagaattatcgctcggatgtgtttcgcgcccgtttattaggaaagacattcatttgtatgagcggagcggaagccgcaaagcttttttatgacacagaacgatttcagcgggagcatgccctccccaaacgggtgcagaaaacgttattcggaacaggtgcaatccagtcaatggacggtgaacggcataagcacaggaagcttctatttatgtcgctgttgacgccgccccggcaaaaacggcttgcggaagcggtggcaaaacagtggaaagcatctgcggaaaagtgggagggttcaaaccgaattgtcctttttgatgaagcgaagaaagtgctgtgccgggctgcctgtgagtgggccggcgtcccgctgaaagactcagaagtgaaagagcgggcggaggatttcaccgatatggtagacgcattcggcgctgtcggaccgcgtcattggaaaggcagaagggcgaggctgaaaacggagaaatggatagaggaggtcattgaggatgtgcggtccggcaagctgcaaacaccggagggctcagccttgtatgaaatggcttttcatacagaacttgacgggaacagacttgattctcacatggctgctgttgagcttattaatgttctgcgcccgattgccgccatttcttacttcattacgttttcagctcttgcattgcatgattaccctgaatatcggggcaaactgagatcgagagatgatcaggaggctgaaagatttgcacatgaagttcggcggtattacccgtttgccccgtttttaggagccgttgtgaaaaaagatttcgtatggaagaactgtgaatttaaaaagggtgcatccgtcatgcttgacctatatgggacaaaccatgattcccggctttgggagaatcccaatgaatttcgcccggaacgttttcaggggcgggaggaaaataaatttgatttcattccccagggcggaggtgatccggctaacggccaccgctgtccgggtgagggaatgaccgtggaagtcatgaaaacttcacttgcgtttcttgccaatgaaatagagtacgatgttccgtcccaagatttgagcttcagcctgtccagaatgccggcattgcctgaaagcggattcgtgataagtgatgttagacgcatatagaacaaaaaacagccctctatcttcatacacaagagggctgttttgcttttacagatggtccggttttttggaattctggttttttcccgcctgccggtttttttcggcaagccggttctttttctgatttacggcgttattgtccaacggttttttgtcatcatctttcatgcggcaaagcctcccttctgtccgttaggatgcccgcccgcattgaaattatggcttcaggaaaaaaatcgcgagcgtgcccggcccggagtgcgcgccgatcgcagagccgattgaatgaagaatgatctctttcggatggaacgcttcttcaatcatttccttcatccgaagcgccgtctcctcgttatctgcatagctgatccccacggtttgatccgcccaatcgccgccttcttccttcatcatgtctataatccgtttaaacagtttcttttgtccgcgtaatttttcgagcggcacgagcctgccgtcatccacatgcagaatcggtttaatgttcaaaagccccccgacaaaagcggacgtttttgaaattctgccgccccgcgcgagataagcgacatcatcgaccgtaaatatatgtttcatccgtgcgcaaaagctctttacagacgtttcgatttcttgtattgtattcccgttaacacagagtgtttgcgcgtgcatcactgcgagtccgcagcccaatgaagcgcatttggaatctacaatccgtaaatcaaaatcgggaaattcctcttttacttcattggcgatcattacggccgtctgataggtgccggaaagacctgaggaaaaggcgatgtatatcgccggttctcccagttccgcgtattgtaaaaatactttttttatcgtatccggtgatgcctgtgatgttttcggaactttcccgtcccgcatcgcttgaaatatatgatccgcctgaatggtgaccgcgtcctcatattcgtttccgtcaagtgttacgtgcagcggaatgaacccgatccgattttcttcaatataagatttcggcagatcagaggcgctgtcagcaataaggtgaactgtcatcatacttcccttctttccgaatggtgagagtgatgccaactatatcatataaatgtggcaaaatagtgttcaaaactttattttaagggaaaagctaataatgaaaatgagcggaggagcaagccatggtactagaacaagcaaaaaaattagcaatcgtcgtcatcggcgcgtttctgtatgcggcgggactgaatttattcctgataccggcgaatgtatatgccagcggttttaccggtgtcgcccagctgctgtcaagcgtcgttgatcaatacgcccccttttatatttcgacaggagttctcatgttcctcttaaatattcccatcggtgtgttagggtggctgaaagtcggcagatcattcaccgtatacagcatattaagcgtagcgatgacgtccgtctttatgggaattctccctgaaatgagactgtcacacgatattcttctgaataccgtattcggaggagtcatctcagctatcggcatcggtttaacgctgaaattcggcgcttcgacaggcggccttgatatcgtgtcgatggtgctggccaaatggaaggataagccggtcggcacatatttcttcattttgaacgggattatcattttgacggcaggattattgcaaggatgggagaaagcattatatacccttgtcgctctgtatgtcacaacaagggtgattgacgccattcacacccgccacatgaaactgaccgccatgatcgttacaaaaaaagccgatgaaatcaaagaagcgatttacgggaaaatggtccgcggcattacgacggtgccggcaaaaggcgcttacacaaacgaacagaaagaaatgatgatcatcgtcatcacgcggtacgaattgtatgaccttgagaaaatcgtgaaagaagtcgacccgaaagccttcacaaacatcgtgcaaacgacggggatctttggtttcttcagaaaagactgataggagcggatagaatgaagtggctgtttggcctgttattaccggtcattttactgatcggatgcagcagtcaatccgggcagaaggagcccgctgaggaggtatccggagagatgaatgaacagcaagcggaattagccgtaaaccctgtgcagacggatcagcagatcgaatttcaaatgtctttaaaaaataagagcggcagcccgatcgatttcacattcagctcagggcagaaattcgaattgaccgtacatgaccaacatcacaaagaactgtaccgctattcaaaagacaaaatgtttactcaggcgtttcagactgtgaccttaatgccgaatgaaacgtatgacttttcagatgtgtggaagaacgtgcccggtccgggaacatacacggtgacggtgacgtttttagggaagtccgatcagatcggaaaaagactgaaaacggtaaaaacatttgaagtgaaataaaaaagcggcgccctcgtctaaacggggcgcctttttttattgcaatttctccagctgatcctgaaattggtgcagctgctgacgttctgcatccgtcgaattggcgtacgcggaagacacggcgtttttggcgcgtgagacagctttttcctgatcgccgtcctcgaaaccgttagcaatcatgacggcctgctggacaaatgacttggcttgagaaaacagttcgtttctcattaaaagtcaacctgcctttcagccgaatcttttgctgcatcatgctgtgcttcctctaatgtagaccgatatggaaatcttgcgtcatgaagactgacagagtccttgccttgctgaataaaccgttttgatttgtttcgtttacccattgcaatgtcccccttccatatttagacgagatgagtcgtctgttttagtatgggcggaaggctttgtgttatgagcggcaaaacctcacagggagaaataggattttaaaaattcggcgattccgtccgcttcatttgatcccgtgacgcggtcggcggcctgtttgacttcatccgtgccgtttcccatcgctacgccgcacccggcaaaccggagcatttcaagatcgttgtcttcgtcgccgaacgcgatgatccgttctctcggcacttggtaatagtcgctgattttcttcaggccgaccgctttattcatcccgtgtttaatgatttcaatcacatgccacggagccgcccatcttctgtggtcaatgacctcggcgtgcacatcggataaatgcgcgcgtatatccgcgacgtcctcttcctttgcatgaatcaatacggacgttacatcctccttgaccgtttcacgcagatcgccgaatgtgacattcgccgtattcatatgaaacgcctcaattaaatgctcatcatgataatggaagtacacatcatcaatgacctcagcgagcacattatgtatttgataggtctctgtaagttcggcaagctgtctgaccacatcgaccgataaagacgtgtggtagcgtccccatgattcgtctttcgggtggtggacaaatgccccgttaaaattgacaatcggcgttgtcagcccaagctcgtcataatacatcgaactggaacggaacgggcgcccggttgagatgcagacatgatggcccgcttctttcagcttctgaatcgtccgtgccgtttcaggggaaatggttttatcgtcttttaataaagttccatccagatctaaggcgatgagataaggttttgtctccataaataactccttttgtcatataatttgctgtttttcacttatgtacagtgtagctttttaccatctttattgtctacatgttacacttatgattatggttatcctaaggagggagtcaacgtgattcttattgatcatcaaaccgtatcaggcattccgtttttacatattgtaaaagaagaaaatcgggaccgtcccgctccccttgttttctttattcacggttttacaagcgcgaaggagcataatcttcatttcgcttacctgcttgctgaaaagggcttcagggcggtgctgccggaagctctttaccacggtgaacgcgctgaacagctgtcagcagaagagctcgccgtccatttttgggacattgtattaaatgaaatcgaggagcttgacgtgctgaaaaaggattttgaagcgcgcggtctgattgaagacgggcggatcggtcttgcgggcacgtcaatgggcggaattacgacattcggcgcgatggccgcgtatgattgggtcaaagccggcgtcagtctgatgggaagcccgaactatacggcattttttcagcagcagattgaccacattcaaaagcaggacatcgacattgacgtcacaaaagaacaggtcgatgaactgtttgcacggctcaaaccgttcgatctcagtctggaaccggaaaaactccgcagccgcccgctgctgttctggcacggcgttcaagacaaagtcgttccgtatgcaccgacccgcggtttttatgaaacgattaaacctcattacagcagccggcctgaccatcttcagtttctgaaagacgaacgggctgaccataaagtcccgagatacgccgttttagaaaccgtcgcctggttcgataagcatttataaagcacaaaggtgttaacaaaacccgcttttacgttatactgaggaaaaaggagtgatggaacgtggaagaagcattaaaagaaaacatcatgggcgccttggagcaggttgttgaccctgagctcggcgtcgatatcgtcaatctcggccttgtatacgacgttgatatggatgacgacggcctgacgcatgttacgatgacactgacatcaatggggtgcccgctcgctccgatcatcgtcgacgaggtgaaaaaagcgctcgccgacattccggatgtaaaagagacggaggtccacatcgtctggaatccgccttggacaagagacaaaatgtcacgctacgcaaaaatcgcattagggattcagtaataagaaaatgcacctcggattttaggtacatcctaaagtttggaggtgcttttcttttgtctgcatttacaaggaaaaaatcaacgcggataagcgacagtgagggtttgttttggatcgcaaacaaacctttaaatataaaatttcatatgttgtttatcttttttgtaataggacagtctgtcttggagtgtacctgtgtggaattcaaatttatgtccatcgggatcagtaaaataaattgacttatgatcttgcttatccctaggacgcccatttaatatatttacatttagattttttaacctttgatgtattgcatcaaaatcttttgggtcaattgtaaaggccatatgcgtataagatttatgtatttcatttcttggtatatccgcctctaagttaagtgcaagccaaagcccgttcagatcaaaatagctgttttttgccctttaaccaggagttgtgcatgaaatactttttcataaaattctatggatttttccaaatttgaaacagaaaaaagaagatgattgattccttttatgtttattttccccacctcgtttaacatgtttgtttgaaacaatccctttggtaatacatctgcatatatatcgattatatactgactaaaaaatcattttaaggattcttgcggatttttatgcccggtgttttccggctgaccgtttcgagctgtactaaacatgattctgtcgggcgccgttctgtctgctttgccgctagagaccggcgtgcggaaagaagggcaagtcactaaaaaaacccgagtttcccaccattcggggttttttgcggtatcgggttaaaaaggaaaaaaacggacgtgaggcatgatataatagaccggctgcatgcgagggaggaatccatgaagaaaaaattacttctcattatccttagcattcttgtttatacggcgctgttcgctgtttccgcttttcacaaagagccggagcagcaggcagggacaatgacggatgacagccgtctcatgcccgtgaaaattaagcagacggtcaaaggaaaagagaaagaaacattggtcgaaacgattaaggaagcaaagagaaagcatctgaagatctcaatcgcaggcgcccagcactcaatgggcggccagacgtattatgaagacggtatcgttctcgacatgacgggctacaacaaaatactcggtctcgaccgaaagaaaaaaatcatcagagtgcaggcgggagcgacgtggaatgatattcagcgctatgtcaatccgtacgggctcgcggtaaaagtcatgcaatcgcaaaacatttttacgatcggcggctcactgagcgccaacgcccacggccgggatatccggtacggttcgctgattgatacggtcaaatcgtttcatcttttaaaggcggacggcaaagtcatcaccgttactccgaaagatgacctgttttcagccgtcatcggcggctacggcctgttcggcgtcatcctggacgcggatattgagctgacggatgatgagctttatgaaatgaaaacgaaacgcatgaacgctgatacatacagtcaatattttacgcagcatgttcagcgtaaccccgccgtgcgcatgcatctcgcgcggatcgcaacaggggataaaggctttttgcacgatatgtatgtgactgattacacactctcagacaaccagaaagaattaaagcggcacaatgaactgaaagaagatgagcatccggcgctgacgaaattcgcgctcggcctctcccgccggtatgactggggaagaaattggttctggtcaacccagcagtcttattttctcagccaaaacggcgtgaaagtctccaggaacaatgtcatgcggtcagaatcgaaatttttggaatatgaaagcacggacaacaccgacgtgctacaagaatacttcgtgcccgtcggcgaatttgcgccgtacattcatgatttacgcaagacgctgtcacatgaagatctcaatctcgtaaatattacgatccgctacgtgcaaaaaaatgaaaaagccgatctgtcatacgcaaaggaagacatgttttcactcgttcttttaatcaatgaagggttttcaacagacagccaggcgagtgctgcgcggattgtcagaaaaatgacggatacggcattgcgccaccgcggcagttattatctcccgtatatgctgtatcaaacgaaagagcagatgcgcgaggcatatccgaaaagcgatatgttctttcagaaaaaacacaaatatgatccggatgacttgtttatgaattatttttatcagaggtacaaatcatgaaacacaaccatttaaaatggctgatcctgtctcagagcagtgtcttttttgccggcagcctgatctttccgttttatattttatttattaaaaacatcggttccagctacacgcaattcggtctctcatacggcttgttcggcctgagcggcgcattgattcatccgctgctcggccggctgtcggcaagactggattcccgctggttccttatggcaaattcgtgggggatggcggtgcttcttctgacgctcccgcacattaccagcgtgcaccaggtttatgttgtgcaggtgcttctgggcctgttcggcgcgatgcaaaaacacggcgagaaaatcatgatcgccgattacaccgacggcggggagcgggggaaaaaagtcggcagctatcatttctggacggctgtattttcagctgccgccattattctcggcgggtttctcgctgatttctttacggtttatattattttttacgccagctccgtgctgttttttataagcgggctgatgatgctgaaaaaaacaggctgatccgatcagcctgtttttcttatgcccccctcgatcgagagggggttttttgtcagcgaaaacagatggaaaatgaatgaaaaaatattaaatatacaattgaattaatttttattcatgttataatgttaaataatttcacaaaaaccaagaaggtgaacccgttgaaaataggtattataggcgcgactggttatggaggcgccgaacttgtcaggattcttaaccatcacccttatgcaggatattgtatattatattcatcgagcgacgaaggaaaagaatatgccgcttcatatccgcatttgaggagtatagcgtcacaatcacttcggccgcttcatatagaaacgatccgaaacgaaattgatgtcatgttcatagccgcgccgcccggcgtttccggagagtggtcgcccaagctggcggaggcgggcatcccggtcattgatctatccggtgatctgcggattcaaaacccggccgtgtatgaaaagtggtataagcggaaggccgctccgaaaggaacgattcaaagcgcggtttacggtttagctgaactgcaaaaagaagagattcagactgcaaagctgattgccaatccgggatgttttccgacggctgtgctgctcgggctcgccccgctggcgaagaataagcttttacaagattcatttctgattgttgatgcgaaaacgggtgtatccggcgccggccgaaaagcatccatgggcactcattattctgagctgaatgataatttcaaaatttataaggttaatgagcatcagcatactccggaaattgaacagcaattagcggcttggcagcccggcacaggcccgatcacgttttccgctcatttggcgccgatgacaaggggcattatggcgacgatgtataccgacgcccctccgggaatgtctgctgcacaggtaagagaattgtattccgaattctacaaagattcatattttgtcagaatcaggccggaaggtgaatttccggcgacgaaagaggtatacggcagcaatttttgtgatatcagtgtcaccgtggatgaaagaacaaaccgtgccaccatcgtttctgtcatagataatctgatgaaaggcgccgcagggcaggcggttcaaaatttaaatatcatgaatggctggcaggaagaaacgggacttacgatgacgccagtctatccatagaacgaaagagggattcaaaaatatgattcagctgagtgaggaaatcacgaaaataaaaggcggcgtatcctcgccgaaagggtttgaggcaaagggcgtgcattgcggtctgcgctattcaaaaaaagatctcggagcgattatcagcgaagcgcctgcagtcagtgcagcggtatatacgcagagccattttcaggcagcgccgctgaaagtgacgcaagccagcctgaaaaaagagggtgtgcttcaggcggttatcgtcaacagcgcgattgccaacgcctgtacgggagaccaaggattaaaggacgcctatgaaatgcgggacggcttcgcgagccagctcggcattgagccggagcttgttgcggtttcgtcaaccggggtgatcggcgagcttttagacatgaaaaaaattcaagcgggcattgaacagctcggtcaagcgccgtccgtatccggagcatttgaagaagccattttgacgacggatacagtgacgaaacagacgtgttatgaactggtgatcggcggagacatcatcacgatcggcggagcggcgaaaggctccggcatgatccaccccaacatggcgacaatgctcggctttgtcacaacggacgcggccgtggaagaacaggcgctcaaaaacgcgctcagagagattacggatgtttcatttaaccaaatcaccgttgacggagaaacatcgacgaatgacatggtgcttgtgatggcaaacggctgcgcggggaatgattgcctgacggagcagcaccctgactggccggcttttaaaaagggattaaagcttgtatgcgaagaccttgccaaagatatagccagagacggtgaaggagcgacgaaattaattgaagccagagtcgaaggcgcgaaaaataaccttgaggcgaatattatcgccaaaaaaatcgtcggctcaagccttgtgaagaccgccgtttacggcacagacgccaactgggggcgcatcatcggcgcaatcgggcacagtgcggcaagcgtaacagccgaacaagtggaagttttcctcggcggccagtgtctgtttaaacacaacgaacctcagccgttttcggaaactgatgccaaggagtacttatcaggtgatgaaattacgattgcagtccgcctgcaggaaggctccggcagcggccgggcatggggctgtgacttaacctatgattatattaaaatcaatgcgagctatcgcacataacaaaggggagcggcatgaagaaaacgatcgtttttaagtgcggcggaagcgtaatccgcgagttatccgccgatttttttcaaaatgtaaaagagcttatgcaatccggctggaacattgccgtcgtccatggaggcgggccggacatttcaagaatgctgaaaacattgcagattgaaacggaatttgtcgatggacagcggaaaacgaccaaaccggtgctggaaacagcggaaatggtcttgtcagggacgatcaataaatttttcgtaaccgaactcgcgaaaaacgggctgaaagccgcgggaatatcaggaaaggacggcggtctccttcaagcatcctatcttaatcaagacaaatacggagaagtcggcgaaatacaaaaaaccgatccgtcaatcattcacgcattaatgaaagaaggcatcattcccgttatcgctccgctttccatgacaagtgatttcgaaacgctgaacgtcaacgcagacgccgcggcatcggccgtcgcttcagccttacacgccgacaaacttttatttgtcacggatgtcgaaggaattatggacggagagagcaggctggatactttgacgccgcaagagactcacgccctcatagatgaaggcgtgatttcaggagggatgattccgaaggtaaactcggcattatcggcactgagtgaagatgtcgaggaagtgatgatcgtaaacggaaaaggagcgttttttaccgatcaagccttccaaggaacaaaaattgtcaaagaaaaggagagcgtgtcatgagcagtctatttcaaacctacagccgctggcccatcgatatcaaaaaagcgaaagggacaattgcagaggatgaaaacggaaaaacgtatctcgattttattcagggcatcgccgtttccaatctcggccattgtcatgatgaggtcacagaagcggtgaaagaacagcttgacagcgtatggcacgtttccaatctgtttgaaaatgatcttcaggaaaaagccgcggcaaagcttgccgaacatagcgcgggggatctcgttttcttctgcaacagcggggccgaagcgaatgaaggcgccattaagcttgcccgtaaagcaacgggaaagacaaaaatcgtaacgttccatcaatcctttcacggacggacctatgcggggatggccgccaccggacaagacaaaatcaagaccggtttcggaccgatgcttcaaggctttcactatcttccgttcaatgatccgtcggcattcagcacgctttcaaaagaggatgatatcgccgccgtcatgcttgagacggtgcagggagaagggggagtcaatcccgccgatccggaattcatcgaagccttacagacattttgcaaagacaaacaggcgctgcttatcgcagacgagattcaaaccggaatcggccggacgggcaaggcattcggctatgagcatttcggcatctctccggacatcatcactgctgcgaaagggcttggaaacggttttcccgtcggagccgtgatcggcaaaaagaagcttggcgacgcctttacgccgggtacgcatggtacgactttcggcggcaataagcttgccatggcagctgtgaaagcaaccttggacattgtgtttcagccggactttcttcaggcggcggcagacaaaggatcatttttaaaagcgcagctgaaccgtgaactgacaggaccttttgtaaaagaaatccgcggaaaagggttattaatcggcattgaatgcgcaggtcccgtgtctggcatcatcggagatctgcaggaacgcgggcttctcgtgcttccggccggaccgaatgtcatcaggctcctgccgccgcttacggtttctgaagaagaaatgctgtcggccgtcagtatgcttaaggcagcgatcgaagcgcattcggcagtgaaacgataattttttttcgatataaaagtataaaaattcatattttcaattaattattcatcaagaggtgggctttagatgaaaggctatttagtattggaagacggaacatcattcggcggtgaacttgaaaaagaggcatgctgcgttggcgaagctgtttttttcaccggaatgacgggctatcaggaagtgcttacagacccgtcatataagggtcagatcatcgtctttacgtatccgctgatcggaaactacggaattaatgaaaaagaccttgaaagtaagattcctcaagtcaaggctgttgccgtctatgaagcgtgtgaacatttttctcaccatgaagcagtctcaagcttgagagagtatttaaataaatggaacatcccgctcttaaccgaagtggacacacgggccgtcgtcaaaaccatccgctccggcggcacgatgaacgctgccgtgtcaacaacaggagaaattcccacagcatccggaacagaaaacccggcggagctggcgcagtctgaagacatcacgtcaatggggaacggagaccggcatattgcgctcattgatttcggttataaaaaatcaatcgcctcgtcactggtaaagcgcggctgtaaagtaacggtcattccgtatcagcagatgaacgctgtttatgacattcagcctgacggaatcgtgctctcaaacggcccgggcgacccgaaagcgattgcgccgtacatgaaccggattacatctttactcagtgatttccccgcactcggcatttgcctcgggcatcagctgattgccttggctttcggaggaaatacgtataagctgccgttcggccacaggggtgccaaccatcccgtcattgaccggaaaacgaaacgggtgtttatgacaagccagaaccacagctatgtcgtcgatgaagcatcaattgacgaaaacgagctgtccatcagatttcatcatgtcaatgatacatcagtggaagggctcattcataagcgccttcccgtattaagcgtccagttccaccctgaagctcatcccggaccggctgagagcgagtggatatttgatgaatttctagagaaagtgataccagcaaggagagaaatcgctcatgcctaaagatacaaccatttccagcatattagtcatcggctccggcccgatcatcatcggccaggcggcagaatttgattattcaggaacgcagggctgcatggctctgaaagaagaaggataccgcgttattctagtcaataacaacccggcaacgattatgacggatgaggcgtttgccgatgaaatatattttgaaccgctcacaaccgacagcatcgaggccattattgaaaaagagaaaccggacggtctgcttgccaatttgggcggtcagacggcattgaatttagccgttaagcttgaagaagcaggcgtgctgaagaagcatcacgtcaagctcttaggaacatcggtggaaaccattcaaaaaggcgaagaccgggagcagttccgcgccctgatgaaagagctcgaccagcccgttccggaaagcgaaatcgtcgacaacgaagaagacgccctccgcttcgctgagtctatcggatttccggttattctgagaccggcgtacacgttaggcggaaagggaggcggaatcgcgaaaacgaaagaagcgtttcagacgcttattaaacaggcgctgttagcaagcccgatcagccaatgcctcgtcgaaaaaagcatcgccggatttaaagaaatcgaatatgaggtcatgcgtgacagcaatcatacatgcatcaccgtctgcaatatggaaaacatcgatcccgtcggcgtgcatacaggggactccattgtcgtcgcaccgtcccagacgttaacggatgaagaatatcagatgctgcgttcagcaagcctggcgattatttcggcgctggatgtggtcggcggctgcaacattcaatttgcgctggatccgttcagcaaacagtactatgtcattgaagtgaacccgcgtgtcagccgctcttcagctctcgcgtcaaaagcgaccggctatccgattgccaaaatggcggcgaaacttgccgtcggctatacgcttgatgaactgaaaaatccgctgacgggctctacttatgcaagctttgaaccggcgcttgattatgtcatcgtcaaattcccgcgctggccgtttgataaatttaaacatgccgaccgcacgctcggaacgaagatgaaagcgacgggagaggtcatggcgattgaaagaaatatggaagcggccattcaaaaagcggcggcctcccttgagctgaaaacgatcggcacccgcctgcctgaactcggcggctgtacgatcaatcagctgtgggaattagcggtaacgccggatgaccggagatttttcgtcgtcatggagctgttaagccgcggtgaaacgatagaagacatccatgccaaaacgaaaattgacccgttttttctccatgtattccgaaatatcatcacattggaaaacaagctgatggaagaaggggatcatctgtcactgccgcttttaaagcaggcgaaggtaaaaggcttcacggatgtcatgatcgcatctctcacgggaaaaacggaagaagacatccgtgctctcagaaagaaatcaggcatcgtcccgtcgtttaaaatcgtagatacatgcgccgctgaatttgatgccaagacgaattatttctactccacctacctcggggaaagcgacggagatatcagccgaaaagagaaaaaacgcgccctcatcatcggctcaggcccgatccgcatcggtcagggagtggaatttgattacagtgccgtccacggcgttctgaccctgcaaaagctggggtatgaaacgattatgatcaataacaatccggaaacagtaagcacggattatgaaatcgctgaccggctttattttgaaccgctgacgacagaacatattttgaacgtggcggaacatgaaaacattgattttgccatcgtccagtttggggggcagaccgcgatcaatgccgctgaaccgctggaaaaagcgggcattccgctgctcggaacatcctttgaaacccttgatgcgctggaggatcgggatctgttttatcagctgcttgatgaccttgacctgaaacatgccaaaggcgaaaccgcttattcaaaagaagaagcaacggaaaaagcaagccgaatcggctaccccgtgctgatccgtccgtcttatgtcatcggtgggatgggcatgatcatcgttgattcagaagcgcaaatgtcagaactgctggaaaatgaagcgggcatgccgtatccgattttgatcgatcagtacattacaggaaaagaattggagatcgatctgatttccgacggacatgaagtatttgtgccgacttacacagagcacattgaacgcgccggcgtccattcgggcgacagttttgcgattcttccgggtccgtctgtcacacctgatatgcagcggaatataagagaggccgccgaaaaaatcgcggtaaaactggcttttaaaggcatcatgaacattcagtttgtcattgatgacaaaggggatattctcgttcttgaagtgaatccgcgggcaagccgcacggttcctgtcgtgtctaaggtgatgggggtgccgatgatcccgcttgccgccagattgctggccggcgcttcccttaaagacatcaagcccgaggttcaaaatcagcacggaacggcagtgaaattcccggttttttcttcgcacgccattcaggatgtggacgtaaagcccgggccggaaatgaagtcgaccggagaaggcatgtgtgtcgcgtttgacgcagaaagcgccctgaaaaaaatctacgcgcacgtctgggagaaaaaaggcagcatctatctggaaggctgtgatgcggaattggaacgtcaggctcaagaggcgggatttaccgtatgcaaagatgcgttcccggcatgggcagagcgaaaggataaagcggtccatatcaatttcaatcactctgaagaagcgcgtaaacaacggattgaagccatgacgcacggtgtgacggtctttactgaaccggaaaccgtaaaggcatttttagcaagcggctccggcaaacctcagcctgtatcgctcaaagatctttatcaaaaggaagtggcatcatgcacacaataaaagcggaacacacattaacccatttgtacggcaaagattttctttccttaaaagatgtcagcccgtcagacatcaatgcgcttctgacagaagcttcattattaaaacaacatccgatacagccgattttccaagggaaaacattggcgatgatttttgaaaaatcttcaacccgcacacgtgtgtcttttgaagcgggaatggcccagctcgggggaacgggactatttctttcaagcagcgacctgcagcttgggcggggggagacagtcgcggatacggcgaaggtgctgtccggcttcgttgatgccattatgatccgcacctttgagcatgaaaaagtcgaagagcttgccgagcatgcagacattcccgtcataaacgggctgaccgaccggtatcacccgtgtcaggcactcgcggatctgttaacgatacaagaaataaaaggaaaattaaaaggagtaaaagccgcctatatcggtgacggaaataatgtagcgcattcacttatgatcggctgcgcaaaaatgggctgtgacattgcgattgcttcgccgaaaggctatgaagtagaggaagaggcggtgaatgccgcgaaagaagcggcggctgtttccggagcgaaaatcacccttaccgaaaatccgcaggaagcggtgcgggatgcagatgtgatttactccgacgtcttcacgagcatggggcaggaggaagagacgcagcagcggctgaatgtgtttgcctcgtatcaagtcaacgcctcactcgtcagtctcgcaaaacccgactatacatttttgcattgcctgcccgcgcatcgggaagaagaggtcacgtccgagattatcgacggtccgaactctgcggtatttcagcaggcggaaaaccggcttcacgcgcaaaaagcgctcctgaaagctcttctttacaaacaggatgaacaaaaaaaccgctgaatctcattcagcggtttttgatatttctccgcatacaagcgcatactacataaaaaagaaaaaggaggaaatgacgtgggacagcagcatcaattccgcccgggacaaaaagcgccgaataacggtgtgtacgttgaaatcggcgaaacgggaagcatggtcaaaaacccgcaaaaaatcaagcttacggtgggggaaatgttccctgaaacttcaaaccacaacagattgtggacgtatcaacgaaaaccgtgaacacaaaaaaacctgctgaatagcaggtttttttatttaatgctggcttgcatcctgtttgacaggcatgatctccgcaagaacaaagactagcaccgcaataaccacggcaataacggatgattgcttgaaattgtacgccgcgctgttcatggaggcgaccaaataacaggccatatgtgttaaaaggaacgtccaaataaaaccgataataaaccgcacgtttccacctcgtccttcattttattctacgttgtatcataccatacataaagcgcgggcggaaggtcattttctcatcaaaaagcgcgcctgaaactgacatttgcccgcctgtccggccgtctgacggaaaattcggttcctgtgctcgggataatagccaaaacatagcagcaaataggagtttatccgatccgttttcattcttcttacatatgatagccaatagagagattaggagtaaaaggaggcgggcaggcatggggattacggaaagatttttccaattcggatctgagctgaacgtcatccatctgccgtatcggccgaatggcttctgtatctttattctgggggacagaacccactttgtcagccgggactcaagcttttggctcgaacatgaagggagaaaccagctgttacatgtgctgcttgacagagggtacaccatttttaacagcaatttatacgggcggcattggggttcggaaaaagccgtcctttacgccagacagctgatgcattatgtgctgaaacaagaaaccctcaatccgaaaatacacttgctcgcagaaggcatgggcgcccttatcgccgatcaattgctgcagtcttcagcggagcatatccgttcagccgcaatgttagatccttgtcttgaccttcaagcccattttgaatcagagaaagaaaataagttcttttataagcagtttctgagggaaacggcacagagcttcggtgtttctgaaaaagaggcaagctcactgagctatcagaccattaccggctgccgcacccgggcgccggtacatatatggcaaagaacgaccggagcgccgtacccgtacaccctgcatgcgaacgcgtataaagaagcccgggaaaagaccggaagcaagactgatatcacgtatcacctgcttgagaaccctgcgcgtatttacagagccatctgccggtttttccgcagtcatgaaaaagacctgtaatgaatagaatacaacagccatctcttttcagagggctgtttggcttgtgtgtgaatgaaaaaccggaaaggcggcagatgtgatgaaaacagcgctgatcattggagcagatgaatttctcggcctttcattgtgcgaacggttgatggatgagggtgtgcacgttgatgtcattttggcagaaccggaggacaaaacgaggcagctgtatttagaagaacgtttaatgtggctcgcgagaaacgggctttttcaaataatagatgaaatcggtgaaaaggaatacgatcgtatctgcgttcaatacgggagcgggtgtctgcctgaagaaagggctgagcccttatattggattgtttacagtgaggatcacggagactgggagaaaaacgctcagcgggatacagccaaagcgattatccttcctcccctttacggtccgtggacggaagaaaaagaagatggcgaaagcaggatctttttagaagacgcggtctgcgggctgatgaatcagcttgaggctgacggcacagaagacgaaaatcagattattaccctggaaataaaagaaaaaacgcaaaaaacggaagcggaagaaaaaattcaagagtggaaaagacaattttcatcaatattcgacattttttaagaaataccttccatgttatgtgcattaccgctacaataaacgtatatcaattatacatgttatgagtttgaaaaggggttgaacatggcttgatcaccaggcttgtcatgatcttttctgtcctccttttattgagcggatgcgcacaaactccgtttaaaggaaaaattgagaaggtcggaatgctttttcccgataccatcagtgacttggtatggggcacaaaaggttacaaaggtttattagcgatacaatctgaatttaacgttgacgtttattataaagaaaatatcagatccgatgaagatattttaaaagcgatagatgattttcataaaaaaggagtcaatcttttatacgggcacggaaatgaatacgaggaaatcttcaatatgatcagcaaggattatcccgacatggaattcgtcgtcgcaaacggaacggcgaaaagcgataatgtcacaagcgttcatcttatgggagaagcaatgggttttttcgggggaatgacagccgcccatatgtcaaaaaccaatgaggtcggcgtcatcgcctcctttttgtggcagcctgaagtagacggctttatcaaaggggcgaaatatgaaaaacccgatatcaccgtcaatactgaatttacggaccactgggataacggcaatgaagcgctgcatctttacgagaagttaaaagcggaaggcacggatgttgtatatccggccggagacgggtataatgttcctgtcattcagcaaatcaaaaaagacggtctttacgccatcggctatgtcgccgaacaatcgaatctcggcaaaaacacggtgctgacaagcacggtgcaaaacgtagataaagcctatacattaattgccgagcaatataataaaggtacgctcaagagcggagatcacaactttgatttcagggaaggagtcgttgaaatggggacgttcagccctctggtggacaaagcatttcaagacaaaatctcagaccttgtaaaaacgtataaccgaacaaatgaactgccgtcaaatgaatagaggtggatacacatgcagcatgaaaagtctcttgaatttatgcagatcgcgatgaaatacctgccggaagcaaaggcggagcttgagaaatccggcatagatctgtctatggaaatgattcagccgtttatggacctgtttacatcggtcatggcggaagcgtatgagcttggcagatctgatgccggggagctgaataaataaagagagccacttttcatgaagtggcttttcacatgatttttttctttatagcggacaccatcggcgcgaagtctttaaatacgggctttaattgatccagagagttcatgatggaccccagctgattcatcacgtggttgtaatcgatctcttcttcgttttcagcctgaggctgctccgggttttcttccggttctttatcccggtctctggaatcgccgaacatcattttggagaaaatatccatagtgaagcctcctttcgtcttccttttattctatgaggagcagcgtccgatagtttagacgaatatattgccaacagaaaaaaaatagggtagaattagtacctgatactaataattgatcataactaattagttttaaattcattataaaaaaggagtctttccaatgaaagctggaattcttggcgtcggccgttacatcccggaaaaagtgctgacaaatcatgatcttgaacaaatggtagatacatcggacgagtggattcgtacgagaacaggtatagaagaaagaagaatcgccgcggaagatatgtattcatccggcatggccgctgaggctgcgcaaaaagcgcttgatcaggccggcatttccgctgaggagcttgatatgatcctcgtggcgacggttactcctgaccagtccttccctaccgtttcctgtatgatacaagagaagctcggggccaaaaaagcgtgcgcgatggatatcagcgccgcatgtgcgggttttatgtacggtatcgtaaccgccaaacaattcattgaatcgcaaacatacaaacatgtcctcgtggtcggcgtggaaaagctctcaagcattaccgactgggacgaccgcaatactgctgtgctgttcggagacggagccggagcggcggtcatcggaccggtcagcgacgacagaggcatactgtcatttgagctcggagcagacggtacaggcggtcagcacttgtacttagatgaaaaagggcatacaatcatgcatggaagagaagtattcaaattcgccgtccggcaaatgggtgaatcgagtgtaaatgtcattgaaaaagccggcctctccaaagaggacgtagactttttgattccgcatcaggcaaacatccgcatcatggaagcggcacgggaacgtttggagcttccggttgaaaagatgtctaaaacagtccataaatatggaaacacatccgcagcatccattccgatttcattagtagaggaactggaagcaggcaaaattaaagacggcgacgtcatcgtcatggtcggtttcggcggaggattgacatggggcgccatagcaatacgctggggacgataaaaaaaggtgaggtgcacacaagatgagtaaaaaaagagtagtcgttacagggcttggagccctgtctccgcttggaaacgacgccgaaacaagctggaaaaatgcaatcggcggcgtatccggaatcggaccgatcacacgtgtggaatcggacgagtatccggcgaaagtagctgctgaactgaaagatttcaatattgaaaatcacatggataaaaaagaagcgcgaaaaatggaccgcttcacgcaatatgctgtcgtagccgcgaaaatggccgttcaagatgccggtctgaatatcacagacgagatcgcgccgagagtcggcgtttgggtcgggtccggaatcggcggtcttgaaacgcttgaatcccaattcgaaatcttcctgactaaagggccgagaagggtcagccctttctttgttccgatgatgattccggatatggcgacaggccaaatctcaatcgctctcggagcaaaaggagtcaactcctgtacggtgacggcatgtgcgacgggaacgaactctatcggtgacgcgtttaaagtcattcagcgcggcgatgccgatgcgatgattacgggcggaacggaagcgccgctgacaagaatgtcatttgcgggcttcagcgcaaacaaagccctttctacaaatcctgatccgaaaacggcaagccgcccgtttgataaaaaccgtgacggctttgtcatgggagaaggcgcggggatcatcgtgcttgaagagcttgagcatgcccttgcccgcggtgcgaaaatctacggggaaattgtcggctacggctcaacgggtgacgcctaccacattaccgcgcctgcccaagacggggaaggcggtgcaagagcgatgcaggaagcaatcaaagatgcgggcatcaagcctgaagaaattgattacatcaacgctcacggcacaagcacgtactacaatgataaatacgagacaaaagccattaagaccgttttcggtgatcatgcgtacaagcttgccgtcagttcgacaaaatcaatgacgggtcatttgttaggcgctgccggaggaattgaagcaatcttctccgtcatggccattaaagacggcattatcccgccgacgattaacatcgaaacacctgatgaagagtgtgatttagattatgtaccggacaaagcgcgcgagcaggatgtcaacatcgttctcagcaactcgctcggcttcggcggacataatgccactttgatctttaaaaaatatcaataatacagtttttgaccggctgcctgaaaaaggtggccggtttttttgtgtgtgcatatgataacaacaagaggaggcgaaccggtatgagcgtcaagcagacatatcaatggatggaaaaggcggcatccgtaaatgatctggccccgcatcttttgccgctttttgcaggggccgataagaaagagtggaagccgatactcgggatgctgcaaaaccacggcatgttccgccatttgaaggacggcgttaggaccagtaaacggctgaaagaaaaaggatgctacagccatattcaaaaggaggaagcttatttaaaggagaagtggaacgggccggacgtgccgatcgtagttttgcccgtcgacgaacgaaaccggaaaatccgtcaggaattcggatcaaaatccggtctggcctttcgggacaaaatgttcctctttctatcgtcggatagttccaattcagctgtatccgcccttatgacacatgaatataatcacgtctgccggttagaacatgtgacaaaggacgaaaaagacgagacatttcttgatacaatcatgatggaggggctggcagaatatgctgtatatgagcggttcggctcaagtcttacggctgaatggacgtcctactatacgcctgagcagcttgattttctgtttgaaaaaagaatcaagccgaacctccgcttaacgagagacagcagaatgttttcccagctgttatacggaaaaggatacttcccctcaatgctcggctatgccgtcggattcaatatagtaaaaaaatatttaaccgaccatcaaaaaacagtaaaagaagcattggccatcccttcaaaaacctttctggaggcaacgctttaatagattaaaagaatggaaattatttaaggatattacatttatcctaaaaaattcttgcttttgtaataatgatgtaataatatacaactataaaatttttcgactattctatattttgtgatagcgaaacgtatgtttccctctgcttcagcggaatgagaaaggggcgtatcatgagcacactattagaagtgaataatttaaagacctattttttcagaaagaaacagccgatccccgcagtcgacggggttgattttcacattaacaaaggcgaaaccgtcgctcttgtaggagaatccggctcgggcaaaagcatcacctcgctttctattatgggacttgtccaaggctcgggcggaaaaattatggacggctcgattaagcttgaaggcagggacctggcctccttcaccgaaaacgaatattgcaaaatccgcggaaatgacgtctctatgatctttcaggagcccatgacttccctgaatccggtgctgaccatcggcgaacaaattaccgaagtgcttgaataccataaaaaaatgaataaaaaagaagcggctaaaaaagccgttgagcttctggaactcgtcggattctccagagcggaacaagtaatgaaagaatatccgcaccgtctttccggagggatgagacagagggtgatgatcgccattgcgctcagctgcaatccgaagcttctgatcgctgatgagccgacgacggcgcttgatgtgacgatacaagcccaagtattggagctgatgaaagacctctgcaaaaaatttgatacttccattctgctgatcactcacgatttaggtgtggtttccgaagccgccgacagggtgatcgtgatgtactgcggacaagtcgtagagagcgcgagtgtggaggacttatttttaaaccctcttcatccgtataccgaagggctgttaaactccataccggtgatagatggagagattgatacattaaaagcgatcaaaggcagtgtcccgacaccggataatcttccggaaggctgccgatttgccccgaggtgttcaaaagcgatggacaaatgcaaaacagggcagccggagctgataacgcatgaaagcggccgttctgtaagatgttttttatatgaggaagagggtgcccaatcaaaatgacagctgcaggccaagaaacgattttagagctgaaagacgtaaaaaaatatttcccgatccgctccggtttttttcaaaggaaagtcggtgatataaaggctgttgacggtgtttctttttcactgaagcgcggggagacgctcggcatcgtcggtgaatcaggatgcggcaaatcaacggcgggaaggacgatgatccgtttatacaagccgacagacggccggattctttttaagggtcaggatatctccggcttatctgaagaaaagctgagaaaaagcgtccgcaaaaacatccagatggtcttccaagatcccttcgcatcccttaacccgaggaaaacgctgcgttccattattaaagaaccgttccagactcaccatatgtacagcatgagcgagcggaacgagcgagtggaggagctgctggcgaaagtcggccttcatccgagctttgcaaaccgctatccgcacgaattttccggggggcagcgccagcggatcgggattgcgcgggctctgacgttgaatcccgagctgattattgcggatgaacccgtttccgcactcgatgtctccattcaggcccaggtcatcaatctgatggaagaactgcaggatgaattcaacctgacctatttgtttatttctcatgatttgagtgttgtccgccatatcagcgacagagtcggcgtcatgtatctgggaaaaatgatggagctgaccgataaacacgagctgtacggcaatccgcttcacccttatacgcaagcgcttttgtcttcagtgcccgtcacgagaaaaaaagacgccgtcaagcgggaacgaatcatcctgaaaggagaactgccaagcccggcaaacccgccgaaaggctgcgtgttccacacgcggtgcccgatggccaaaccgatctgcaaggaacaaatcccggcatttgaagaagccgctcccggccattacgttgcctgccatttatatgcctgaaatgacaagcatcgagagggggtatgccggattacataaccagtttgctgcatatatatcacaaagggggaattgatatgaaattacgtaaaagcgcactgatgatgctaagtgtttttatggcgtttgccatcttcctgtcagcctgctccggctcaaaatccacaagcaccgaatccaaaccggcaggaaaaccgcaaaaaggcggagatttggttgtcgggtcaaccggggaacccacactttttaatccactttattctaccgatgttgcaagttctgatattgaaggaatgctttacagcacattattggaaactgatgagaaattaaacgtcaagccgtcgctggctgaaaaagtaacagaagctgacgggggattaacgtatgatgtaaaactgaaaaaaggcgtaaaattccatgatggaaaagagctgacggccgatgatgttgttttcacctacagcatccctcttaacaaagattacaacggtgagcgtggctcgggttttgagtcccttaaatccgtaacgaaaaaaggaaaatatgaaattcagtttaaaatgaagaaaaaagatgcctatttctataatgtcgttctcgacagttacggcattttgcctaaacatatattgggtaaggtcccggttgcagatctgggagagaatgaatttaaccgtaaaaatccaatcggttccggtccgtttaagtttgttgagtggaaaaagggcgagtatgtcaaactggaagcaaatgatgattactttggcggcagaccttaccttgatacagtgacagtaaaaacaatacctgattctaacgctgccgtggctcagttaaaagcgggggatattgatttcttcgttgtgccgggcacagattttgatacggttaaaacgtttggaaatgtgaaggtcaaatctgaccttggcttaaactacagctatatcggctggaatgagaaaaaagagatctttaaggacaaaaaagtgcgtcaggcattgacttacgctcttgacaggcaggcaatggtggatcaagtgcttaatggagacggtaaggtagcggatgttcctgagagtccgctgtcatggaattatccgaagtctaaagtgccgacatttgattataatccgaaaaaagcaaagcagctgctaaaagaagccggatgggaggaccatgacggtgacggctaccttgataaagacggaaaaaaattctcttttgaaattaaaacgaatcaaggcaataaaattcgtgaagatttagctgttgtcgttcagcagcaattaaaagaagtgggaatcgaggctaaaccgcgaattgttgaattcagtgcgttaattgaacagacaagtgcccctaattgggattatgacgctcttcttctcggatggagtcttgcaacgttcccggatcaattctctatcttccattcaagccaatcgaaaaacgggctgaataatatctggtataaaaacccgaaagtcgataagctgcttgaagaagcgaagacaattacagacagaaaagaataccaaaagaaatatgaagagatatacaaattgattgctgaagatcagccgtacagcttcttattctattacaattaccacagagcgatgccgaataatttacaaggttatgtattccaccctaaaaatgacttgtacaatattgaaaaatggtggctggatcaaaaatagcaaaagccctggagagggaaggaggttcctttcctctcttatcctatttaaaaaggggacaagaacatggttacatatattttacggcgaacattaatgtccttgccgattctcttaggcattacaattttgtcgtttgccatcatgaaagcagcgccgggagacccgatgtcacttatgatggaccctacaatcagtcaagcggacagggcgaaattcattgaaaaatacgggttgaatgatccggaacctgttcaatatgtgaaatggctgggtaatatgctgcaaggggatttcgggacttctatcgtcaagaaaggcactccagtttctgaacttatcttatcccgcttaccgaatacgattgtgcttatgcttttctcaacccttgtcgctcttcttatttctattccatttggtgttctgtcagcgaaacgtccttattcaaaattggattacgggataactgttacttcatttttagggcttgccattccgaatttttggttcggtttgattttaatcatggttttatctgtaaatctggggtggtttcccactggcggagtaagcactttgaatgctgactttaacatatttgaccgattgcatcacttgattctgccttcttttgtgctcgccacggcagacatggcagggataacgagatacacaagatccagtatgcttgatgtgttaaaacaggattatatacgaacggcgcgtgcgaaaggattccgagataataaagtgatttttaaacacggtttgagaaacggacttcttcctgtcatcactatttttggtctgatgataccgtcatttatcgggggagcggtagtggtagaacagatttttacttggccgggtctcggcaaattgtttattgattcagccttttcgcgggattatccggttatcatggccatgacggtcatttcagctgttttggttgtggtggggaatttaattgcggacatcttatatgcgctggttgatccccgcattgaatattaacaaagagaggtgagaggtcaaatgttacagccaaataccggcacaccccccagcgaagtaaaattaaaggaaaatattcaatccaaaccggaaacaatgacgaagatttttttcgaaaagttctttcaaaataaactagctgtaatcggagccgttatattaaccatcatcatcttgtcagccttattcgcttcggtaatcgctccttactctccggagagtcaatctcttatcaatcgtttgaagccgccgagcttaaaacatctaatgggaactgataaattcggaagagacatctttacgagggttctgtacggggcgcgcgtctccttgcttgtcggattcgcttctgtgatcggcgcgattacaatcgggacagttgtcggagccgttgccggatattttaaagggattgtcgatgccgttctcatgagaaccgttgatatcgtattatccatacctgatatatttttgcttattacacttgttacgattttccagcccggaatggataaattaattttaattttctcccttacaggctggacaacaacggcacgccttgtccgaggggagtttttatcgcttcgttccagagagtttgtattagctgcaaagacgatcggtacaaaaaatcatcacatcatcttttctcatatattgccgaatgcgctcggaccgattattgtttcagccacattaaaggtgggaacggttattttggcggaatctacattaagttatctcggtttcgggattcagccgccgatcgcaagctggggcaatatgcttcaggatgcacagaactttacgcttatgattcaggcttggtggtacccgttattcccggggttgttgattcttcttaccgtattgtgctttaactttgtcggagacgggctgcgtgatgcgcttgatccgaaaaatgtgaaatgatctcccggacggaacgggagatttttttgttgcgatgcagtcggaaatccagctccgtaatgcggaaatctcatattgaaatggaataatttatctatcccttgcctatactgtggacaacagtttttataaagtgaggggtcgaatatgttatttcttcatgatgtatgggtcaattggtttgaaggggaagaaaacggctacaatgtatgccattttcacgaatggcggaaggaagacacggttgagcttttggatcagacgccgctgctcagagtgccgtcggtattatttcattacatagaaaacgacttatcagagcttccgaaagagctgcttgaccaagtccaccaaaagtcatacgtgcgaaaaaatcatgagcggacaaagctggagtactgttttgtcgtgacagacgggatcggcatcattgccgtggatacgatcggatataccattccggtcagaaagagccgcctgattccgagacaggagcagcttgtttatgaaatggtaaaggatgtagaaccggaatcgtttcaatttgagccggcgcaattggagtcttcaaaggaatatcacattttgtcattggcgccggagcacgtcagagggctgacgagaaaagagcggcagatcaagcagctgatgtttatggcgctcgaccagctgaaagggctgaaaaaccgtgcggaaattgtatattggtacacggaatggaatccgcatatgtacgagcagatcaaacggatgagctttgaagagatttgggacatgctttacaatgaaacaattgaaggctggtcagataaacatcttgcgttctgtgaaaatttgattaaagggcagccgtttttcgaaaagctttgggaaatggaacaggaatcaaaagtgaactaaaagaggcggggattctcccgcctcttttctttatcttctttttcgtccgagacccatggcgttttccattttcttcaccattttgccggccgttttgtttgcgcgcgccgctccttcgtcgagaatgcggtcaagctcgtcgctctcaattaattcacggtagcgctcttggatcggtgtcaatgcgccgataacgacttcggctaaatcgcttttgaattcaccgtaccctttgccttcatatttagcttctaattcttcaattgatgtgtttcctaaaatagaatagatcgtcaaaagattagaaacgcccggtttgttttctttatcatactttacaatgccttcagaatcagtcacggcgctcttgattttcttctcgagctgcttcggctcatcaagcagcgtgatgaatgccttttggttcggatctgatttgctcatttttttgagcggatcagccagtgacatgatgcgcgcgcctgattcgggaattttcacctcaggaatcgtgaagatgtcattgtattttttattgaagcgttccgctaggttgcgggtcagttcaagatgctgtttttgatcttctccgaccggaacaagatccgttccgtacagtaaaatatcgccggccatcagcggcggataggttaacagtcctgacacgacggcttctttgccctttgacttatctttaaattgcgtcatccgctcaagctcgccgatatatgcgacgcattggagcatccaccccgcctgggcatgagcgggaacctccgactggataaagagggtcgctttctcgggatcaagtccgacggccaggtaaagagccgcgagattgcggatgttcttccgcagctcaagccgatcctgcggtaccgtaatcgcatgctgatcgacaatacagaagtagccgttgtagtcatgctgcaaatcgacaaattgtttcattgcgccgatgtagttgccgagggtaacggaaccgctcggctgaatgcctgaaaaaatcgttttcttcatatttcttacctcatttcttaaaacataataaaaaaagcccattcttcccgtagaaaaaagggacgaatgaaccgtggtgccaccctgattattccattacaatggaatcgctcgagacgttggtaacggaggctgctccggctgggcctactaacgttcggtcagctgctcagaagtccattccacatcgcccgttacctgctcccagcaccgcagactctcttcaaacggatgaaaatgtgtactactcttcatcatcgcaatcacaacaaatgtatttgattgatctattataaatcaattatagccaaatgtcatcagaggaatacaagcttatttccagtttgcttaagggctggaaatcctcaaaaagaactgaaaatgcttaaatgataacgtatatcaacatttcgtataacgaatattatatgtaaaaagcaatatgaactggaaattgcaataaaaaaatttagttaggtcatgctttaaactatagaagtgtatcacctttttgacagaaaaactgaccaaatttaaatattttaaattgagaaaatagtattgcaataaattattcatttcattataatgaacttgttcactctattgttacagcttctttacataaaataatcagaaaagacggaacacaattaaagtttagaaaaatattaagttattttgtctgatatttctgagtatttagtagtaaaggctgaaaaatttgattagggggttagtgcatgaaaaagcgttggtctattgtaggtttgatgcttatcttctcgcttgtattaagtgcgtgcggcggattcagcggcggatcaggcggcggtaaaaaagacaccaaaggacagacttcacttaatatcaatattaaaaccgagccgttctcactgcatccgggtttagcgaatgattccgtttcaggaggcgtaatccgccagacttttgaaggattgacacgcgtaaactccaaaggtgagcctgaagaaggaatggcatctaaaattgaaacaagcaaagacggaaagacctatacatttacgattcgtgacggtgcgaaatggtctaacggcgaccctgtgacggcgcaggattttgaatatgcgtggaaatgggcgcttgacccgaacaacgaatcacaatacgcttatcagctctactatatcaaaggcgctgaagctgccaatacaggaaaaggcaagattgatgatgtaggcgtaaaagccgtaaatgacaaaacattaaaggttgaactgaataacccgacaccttatttcacgcaattaacttcattctatacgtatatgccgatcaacaagaaaatcgcggaaaaacataaaaactggaacacaaacgcgggcgaaaattatgtgtcaaacggcccgttcaaaatgacggcctggaaacacagcggttccatcacgctcgaaaagaacgatcaatattgggataaagacgctgtgaaattgaagaaaatcaacatggtgatgattaacaataacaacaccgaactgaaaaaattccaggccggtgagcttgactgggcaggaatgccgctcggccagcttccgactgaatctctgccgacattgaaaaaagacggatctcttcacgttgaaccgatcgcaggcgtgtattggtacaaattcaacacagaagcgaaaccgctgaacaatgtcaacatccgtaaagcccttgcttatgcgatcgaccgctcgtccatcgtgaaaaatgtaacgcagggcgaacagatcccggccatggctgcggtgccgccgtcaatgaagggattcaaggataacacaaaaggttatttcaaagacaatgacgtcaaatcagctaaagaattcttaaataaaggactgaaggaattgggcgtcaagaatgcctctgaccttccggcgatcaaactgtcctacaatacggatgacgcgcatgcgaaaattgcgcaggccgtacaggaaatgtggaaaaagaacttgggcgtcaaagttgagcttgataactccgaatggaatgtttacatcgacaagctgcacagccagaactaccaaatcgggcgtatgggctggctcggcgatttcaacgatccgatcaacttcctagaattgttccgtgataaagaaggcggaaacaatgataccggatgggaagatcctgagtttaaaaagctgctgaaccaatctcagcttgaaacggatccggataaacgtatcgaagagctgaaaaaagcagaaaagatctttattgacgcaatgccggtcgtgccagtttatttctatacggatccttgggtgcaggataaaaacctcaaaaatgtgatcttgacaggaacaggcgaagtttacttcagaaatgcttcttttgaataaaagacggttctgaaaacaaaagacccaaggtatatggggaggatgtccccatatacctttcttactgattaagtataaaattgtaaaaaacatggaggtgttcaccttgctgaaatatatcggtaaacgattcatttacatgatcatcacgctgtttgtgattgtgaccgccacattcttcttaatgcaggcagcgccgggcggaccattttccggcgaaagaaagctgccgcctgaaattgaggcaaacttaaacgaacactatggcttggacaagcctcttttcgttcaatatgtcagctacttaaaatctgtggcgatgtgggacttcggaccttcttttaaatataaaggccaaagtgttaatgatttaatcaattcaggcttccccgtctcattcactctcggtgcagaagctattctcctcgctttagcgttcggtgtgcttttcggggtgcttgctgccctgtaccataataaatggcaggattataccattgcgattttaacgatatttgggatctcagttccgagctttatattggcgacgattttgcaatatattttctcaattaaattagaactgttcccggtcgcagggtgggaatcctgggcatacacctttctgccctctattgcgctcgcttccatgccgatggcgttcattgccagactctcccgttcaagcatgattgaagtgttaaacagcgattacatacggactgcaaaagctaaaggactttcccgtccgtcagtcaccgtgcgccatgcgctgcgaaacgcgcttttgccggtcgtgacatatatggggccgatggcggcatccattttaacggggagtttcatcattgaatccattttcggaattcccggtttaggcgcgcattttgtaaacagcattacaaaccgtgattatacggtcattatgggagttaccgtgttcttcagcgtgctcctgcttttatgcgtattaattgtagacgtgctgtacggattaatcgatccgagaatcaagctttccaaagcaaagaaaggagcctagaccatgcagaacattcctaaaaatatgtttgaaccagcttcagctaatgccggcgatgccgaaaaaataaataaaaaaagcctttccctctggaaagacgccatgctccgcttctgcagcaataagcttgcgatggtcgggttcgtactgatcgttcttattattctgatggcgatttttgcgcctgtcttttcaaggtatgattatgccactaccaatctattaaatgcggataaagcgccgtcgaaagatcattggttcggcacggatgaccttggaagggatatattcgtccggacatgggtgggcgcgcggatttccatctttatcggtgtcgcagctgccgtgcttgatttattaatcggcgtaatctggggcagcatttccggattccgcggcggacgcacagatgaagtgatgatgcgcatcgccgacattctgtgggctgttccttcattattaatggttattttgctgatggttgtcctgccgaaaggattgctgaccattatcgtcgccatgacgatcacgggctggatcaatatggcgaggatcgtccgcggacaggtgctgcaattaaagaatcaggagtatgtgcttgcttcacagacactcggcgccaaaaccggccggctattgtttaagcatatcgtcccgaacgcgatgggctctatcctcgtaacaatgacactgacggttccgacggcgatttttacagaagcgtttttaagttatttgggcctcggcgtacctgcgccgcttgcgagctggggaacgatggcctcagacggattgcctgcattaacctattacccttggcgtctgttcttccctgccggctttatctgcctggcgatgttcggctttaacgttgtcggcgacgggttaagagacgcgctggatcctaagttacgcaaataaggagtgatatgagtgacacgtttgctagaagtaaaagacttagccatttcatttaaaacatacggcggagaggtacaggcaatccgcggcgtgaatttccatttgaataaaggagagacgctggcgatcgtgggggagtcaggttccggaaaaagtgtgacctcccaagcgattatgaagctgatcccgatgccgccgggctactttaaaagaggacagattctttttgacggacgcgatatcgtgccgatgtccgaaaaagaaatgcaggccatcagaggaaaggacatcggaatgattttccaagatccgatgacctctctgaacccgacgatgagagtcggcaaacaaattacggaagtgcttttcaaacatgaaaaaatctcaagtgaagccgcgaaaaagcgcgccatagagctgcttgatctcgtcgggattccgatgcccgaaaaacggatcggccaattcccccatgaattttcaggcgggatgagacagcgtgtcgtcatcgcgatggcgcttgcggcaaatccgaaactgttaattgccgatgaaccgacaacagcgcttgatgtgacgattcaggcacagatccttgagctgatgaaagatctgcaaaagaaaattgatacatctatcatttttatcacgcatgatctcggcgttgtcgccaatgtcgccgaccgggtcgctgtcatgtacgcgggtcaggtcgtcgaatcgggcacggtggatgaaatcttttatgatcctcgccatccgtatacgtggggactgcttgcctcaatgcctagcctggacagcaccgatcaggaaaaactgacggccatcccgggcacgccgcctgatctgacgaatcctccgaaaggggatgcatttgcgctccgcagctcatatgcgatgaaaattgactttgaacaggaaccgccgatgtataaagtgtctgacacgcattttgtgaaatcgtggcttctgcatcctgatgcgcctaaggtcgagccgcctgaagcggtgaaggctaaaatccgtcagcttccgaatacgtatcagcatcctgttttaatgaaggaaggtgaaaaaaatgactgagaaacttctcgaaattaaacacttaaaacagcattttttcacgcagaaaggaacggtaaaagccgtagatgatttgtcatttgatatttataaaggtgaaacgctcggccttgtcggagaatcgggctgcggtaaatcaacgacgggccgcagcattatccggctgtatgaggcaaccggcggggaagttctctttaacggggaaaatgtgcacgggaaaaaatcccgcaagaagctgctggagtttaaccggaaaatgcagatgattttccaggatccgtacgcatctttaaatccgagaatgacagtcgccgacattattgccgagggaatagatattcaccgcctggcaaaaacgaaaaaagagcggatgcagcgggttcacgaactgctggaaacggtcggtttaaataaagagcacgccaaccgctacccgcatgaattttcgggcggacagcgccagcgtatcggaatcgccagagcgctggcggttgatccggagtttatcatcgcggacgaaccgatttcggcgcttgatgtctccattcaggcgcaagtcgtcaatttaatgaaagaattgcagaaagaaaaagggctcacttacctgtttatcgcccatgatttatcaatggtcaaatacatcagtgaccgcatcggcgtcatgtattttggaaaattggtggagcttgcgccggcggatgagctttacgaaaacccgcttcacccatacacgaaatcattgctgtccgctatcccgctccctgatccggactatgaaagaaatcgtacgcgaaagaaatacgatccgtccattcatcagctgcaagacggagaaaagatggaattcagagaagtgaaaccgggacactttgttatgtgcactgaagatgaatttaaaacctacctataaacgtatcatcctccaagactcagtcttggaggatttttttgcgcacattcaagtttattaagcttgctcccgtttttctataatggaaaaaaagggggagatcagtatgaaaaccattttgtgcgccatttgtgcgggactgtttatcagtgcagccgcttatccggctcacgccgctgcgaaagaggagcagccgcttgtaaaaatagcgctggccgaaaaagaactgccgaaatcaaatgcacggttcgcttatccgtcagggctgcatttttcacatcctgataaggtgcggggcatttacgtcacagggcattcagcgggaggaagcaaattcggggagctgacagactttgtggacaaaacggagctcaatacaatggtgattgatgtcaaggatgacaacggaaacctcacctttaagccggacggccattctgagtatgccaaaatcgccaagccgtacatcaaagacccaaaaaagatgatgaaaaagctggaggaaaaaaagatctatccgatcgcgcgtattgtcgtatttaaagacagcgaactcgcgaacaaaaagccggagtggtcctttaaagaaaaaaacggaagtgtctggaaaaacggccgcggcgagtcgttcgtcaatccgtttatgaaagaagtatgggattacaatgtaaagattgcaaaacaagccgtaaagatgggttttcaagaaattcaatttgattatgtccgttttcctgaaggatttgaaaaacgtgatgacgaactgacatacggacacggcgattacggaaaaacagcagacagcaatgtgcaaaaacgcgttcacgccgtcaccgattttgtcggttatgcgaagaaaaaactcaagccgtacggcgcggatgtgtcggttgatattttcggctattcagccacgctgccggaagcgcctgggatcggccagaatttcagcaaaatttcagaacaggtcgatgtcatttcatccatgatttatccgagccattggacaagctatttcggcattgataaaccggatcttgagccttacaaagtcgtcaaagaatacgcgaaggtggaacataaaaaactgtctaagctgaaacacccgcctgtatcgcgtccgtggcttcaggacttcacggcatcatatctcggcagcggaaattatcaaaagtacggaaaacgccaggtggaagaccaggttaaagcgctgcatgatgaaggaattgacgaatttttattgtgggacgcggcaaaccgctataccaaaaacgtcgattacacaccattttaaaaaaattgaaaccatgttaaaggatcacacgtcttatagatgtaagattgtttaaacaatcggaaatggggtatatctaaaagtgtgaagtcaacgaacccataaggagcaaatgaatgaactggtacgaaaagctgagtgaatattttccgattgaagaaatgaaatcaaaagcgcatatggaagctctgttaaaggagcaaagcgatgtttatcataaagaagaggggcagtaccacgtgctgatgtatgcggaatttgactctttcatctttattgattacctgtttgtgtcaaagaaatccagaggacaaggcctcggaagcaagctgatcggcaggctgaaaaagaaaaacaagccgattctgcttgaggtggagcctgttgacgaggatgacacggatacacagaaacgcttgcgtttttatcaaagagagcatttcaagcacgcgcagtcaatcgggtatcggcgccggtcattggctacgaatgaagtgaacaaaatggagattctgtactggtcacctaagacggaatcagaagaagaaatgtttgaagcgatgaaacagacatatgaaaacattcacacttataaagatgaaaaatggtacggagaatcatacgaaaaaacggatgaagttctcaaagtcattgatgagaaaaaacgaaaaaacattttcgatcagctgagctaattgagaatggggaaacatccgccagccgtaaatttgccggattgacacatttttttctcaggagactgttcacacttacttttttatagtataatacctataaagattccttttttaaagttatttcaatttgagaatacaacatgttcatcctactaattagaggagtgaagattaatggttacattatacacatcacctagctgtacgtcatgcagaaaagcaagagcttggcttgaagagcacgagattccgtttgtagagagaaacattttctccgagccgttatcaattgatgagatcaagcagattctgcgtatgactgaagacggtacggatgaaattatctctacccgttctaaagtattccagaaactgaacgtaaatgttgaatctatgccgcttcaagacttatatactttgatcaatgagcatccgggactgctccgccgtccgattatcattgatgaaaaacgtctgcaagtcggctataacgaagatgaaatcagacgattcctgccaagaaaagtgcgttctttccaattaagagaagcacagcgtcttgccaactgatataagcttacgataagcatggaaaaagcccaaaaccatcgcggtttgggctttttgttatttttcagtctgctggtaaatcatactggcgaggataacaaatacgacggtcaaaatcggcagcgtcatttgtataatgccgtgttctgccatgaaaaatgacagcttgctgtctccggcaatcatttcaccgccggtaaatgcgagaagaccgctcccggcgtacatcaataaaggcattttgtccatggcggcatgaacgagcttgctgccccaaatgataatcggcaccgagatgaagagaccgatgattacaagtgtcagctcaccgtgagaagcgccggctactgcgatgacattgtcaagcgacataaagatatcagccagaacgattgtgcggatggctttccaaagagaagaactgcttttcacatgctgcgcatctttcttctcaatcaggagctgatagccgagatacaataaaaataccccgcctgcgcattgcaaaaaaggaacattcaataaatagaccgcagcgctcgtcagaacgattctcaagacgactgcgataaacgttccgaagatgatcgcttgctgtctttgtttatgagccagattccggctggccatcgcgatgacgacggcattgtcaccgccgagaataaggtcaatcccgataataagcagaagggacagcaggtaatcgtgcggcatggtaacacctcgcttatagatcgattgcttgtacagctaatatatgaagcagtgcgctatttatgatgggaaccgggagaaagcctgtttttcggtgtgaaaatgcttttttatttcttttataactgttttatcataaaatagaaatataaagaatttgcgctgtcttctataaggttaagatgtggacggaatgggtaaagtgtagtaaagtactattcatcgggagcttagatgtcccttcaacatcttataaagaagggaaggttggcaaaatggaaatagaaagaattaatgagcatactgtaaaattttatatgtcttatggtgatattgaagatcgcggttttgacagagaagaaatctggtacaatcgcgagcgcagtgaagaactgttctgggaagtcatggatgaagtgcatgatgaagaggaattcgctgtcgagggtcctctttggattcaggttcaggcattggacaaaggactggaaataatcgtaacaaaagcccagctttccaaggacggacaaaaactcgaactgccgatcccggaagataaaaaacaagagccggcagatgaaaatctcgatgctttacttgatgatttccagaaagaagagcaggccgagagccgggaagataaggagcaaaagcttcagttcactttgcggttcgatgattttgaggatctcatctcgctatcaaaattgaatcttaacggaatcaaaacgaccctgtattcgtttgaagaccgatattatttatatgcagatttttatgagcaaactgatgaagaggttgaaaatcagctaagcatcctgttggagtacgcgcacgaatcatcagtcagcattcaccgtcttgaagaatacggcaaattggtgatcgctgatcatgcgttatatacaataaaaaaacactttgcatcataacaaaccgatttctctcagcagaaatcggttttttttattctgaatgacaggattaacggctgaaaaccgtataacggctctcattcgcaaacaggattatatcttcttcctgctgaatacaacaagattcaggaaaggagaagatgcaacatgttcagtgctgtgactgccgacggacggctcattcagctggccggaagctattcaaaggaaaaagcggcggagctgagaaagaaacgctggttctgccccgtttgcaaaagtgagcttgatatcaaactggggcgggagaaactgccgcacttcgctcataaaaaaagcaggctgtgtcccggggaatccgaacctgaaagcgaataccatctggagggaaaaagacagctttttctctggctgaagacacaagggtgcagcgtcagcctggaaccgtatctgacttccgctggacagcggcctgacttgacggcagaaagcggagaagagaggctggcttttgaatttcaatgtgcgaatctttcggcggactctttaaagagccggacggcaggcctgaaaaacgccgggtaccggccgatctggatcatcggggcaaaacggttaaaacggatggccgcgcaatttttccggctttctgcttttcactggcagttctttgaagtccattcattttcctccttactgttttactgccccgacgcccgctccttttacaggctgcattccatcactccgttttacaccggctattcttatgccggcttaaccgcaatccctcttcacaaagcaaacctgaaagacatttgtcatccggaagggcggcacagcgtcagacttccctcgtggggacgtgccgtagccggcttccgcagcaaaagcgggcggtttttatctgaagatgccggtcttatccggcgtcttttttacgaaagacatcaggttgcatttccatttctcccatctgaagtgtttattcccgtttcagcgggctttgtgtttgccagtcccgtttttgtgtggcagagccatttatacttgcggcttgcggaactttctaaaaaaggcgcgccgatccgattatccggcatggttcatgatttgcggcaaaaaatcaggcgtaaggagattcggatgcggtatggttcacaagatagccttatcagaatggcggtaaaacaatatgctgatttcttatgcttgcaggattttttaagggaaattgagaatgaagtatatatgccctcatctcaacggaagctccctcaaacggcagaagagctgcgccggagggatctcctcttttttggggaatgagaatgcttcatttcgttcaccctaacgtcaaggtggtggcgaatgtgaggggcatacaagcattttgttttcgttttttcactgtattattggtatgctcggtcttatatgccgcatataatttgacaaaaggcagtgaaaagccggaagataatcacaacacaagtttttggagaaacaatcgttttttcaattggcttgaagtaaagaaaacgagggggatcaccatgactgaggaaaataaagcagcacagctgcctgacagaagtgaagtaaaggcagagcatacatggagactagaggatatttttcctagtgatgaggcctggaataaagaatttcaagcagttaaagaattaatcccgaatttatcttcttttaaaggcacgcttgctcattcggctgataatttatacgcggcgcttacggcacaggatgaagtgacgaaccgccttgggaaactttatgcatacgcgcatatgcgctcagaccaggatacgggaaattctttctaccaagggctgaacgacaaagccgcaagcctgtattcccaggctgccagcgcgactgcttacattgaaccggaaattctggcgattcaggaggacaagctgcaccagtttattctggaaaaagaggagcttaaactttactcccatgcaattgaagaaattacaaaacagcgtccgcacgtgctgagcgaacaagaagaggccctgcttgcggaagcctcagaagcgctgtcctcgccttccaatacattcagtgttttaaataacgccgatattacatttccgtcgattaaagatgaaaacggcaaggaaactcaaatcacacacggcaactttattaatttcctggaaaacagcaatcgtgaagtccgcaaaaacgcatttgaagccgtatataaaacatacggacagtataaaaacacgatggcgactacactcagcggcactgtgaaaaaagataatttttacgcccgtgtgaaaaaatataaatcagcacgggaagcggctttatccaataacagcatccctgaagaagtttacgataaccttattaaaacgatcaataaacatcttccgttattacaccgttacattgacctgcggaaaaaggttctcggccttgatgaagtccatatttatgacctttacacaccgctcgtaaaagattcgggaatgaaggtcacatatgaggaagcgaaagattatatgctcaaaggacttgctccgctgggcgaggaatacgcgtctattttaaaagaaggacttgaaaaccgctgggtcgatatatacgaaaataaaggaaaacgcagcggtgcttattcgtccggtacatacggcacgaatccgtacatcttgatgaactggcatgacaatgtcaataatctgtttacgctcgttcacgagttcggccattccgtgcacagctactatacgagaaaatatcagccgtatccgtacggtaactacagcatttttgtcgctgaagttgcttcaacgactaatgaagcgctgctcggtgaatatatgctgaacagcttaaaggatgaaaaacagcgtctgtacctgctcaaccacatgcttgaaggattcagaggcacagtgttcagacagacgatgttcgctgaatttgagcatctgattcatacgaaagcgcaggaaggcgagccgctaacgcctgaactgctgaacgaactttattatgatctgaataaaaagtatttcggtgacaacatggtgattgataaagaaatcagtctggaatggtcaagaattccgcatttctattacaattattatgtgtatcaatatgcgacaggctacagtgcggcccaagcgctgagcagccagatcttaaaagaaggcaagcctgcggtggagcgctataccgaattcttaaaagcaggaagctcggaatatccgatcgacatactgaaaaaagcgggagttgatatgacatcgcctgaaccgatcgaggcggcctgcaaaatgtttgaagagaaactgaacgaaatggaagagcttctttcgaaagtgaacccttcgtaaccaaaaaagcctgtgcattagatgcgcaggctttttctaaaatcccttaaacgtttttcggtgattcagccggtacaaggcaaacaatatggaaagaaacagcaggggagatgtaatgtaaatcggcagcatgtgcatcatggccagcaggtttaaaaagaagaaaaacacaatcattccgatgatcaatacggtgcggagcattgatttccctccttgtttttcattgatatattctatgaaaacaagcagtcagttatgttttgtgacaaaaatatgaacattaatcttatggcttgtcaaaactcgacaagatttgatatgataaggatgtgaaattgatcacaaacaaacattacccctttgtttgaccgtgaaaaatttctcccatcccctttgttgtcgttaagacatatgaaaccgcgcttatcccggcgcggtttctttatttgcacaaaaaaaagccggctccgtaaggaatcagctttttttaatgatcacaacaggtgacatcctcctggttgccggtcagagacttccaaaacagaccgtgctttgcttccactctggcgacctttttggcgaatgccagttttttcatttctttttcaacttcttctagactcaaatcataaacgagtgcgatttctttcgatgcgacaaaccggaaatattcaatgaaacattccaaaggcggcgtttcagaaggcttcggttcatccccgagcatttcgaataagatctcttcgtatacgtcataagaatagttgccgggaaccttcagcccttcatcatcatgcaggctgttaaagaacgtcaatgtcgggttgacggtgacgtccatttccgccgcgattttcatatcgcactgaagcgcttttaccgcgctttgcgaatggaggtcgcgcttgaattcttcaacatccaatttcgtcttttcggcaatttctaaaagaacgtcttcatccgtaatattctgcttggaaacaaacaggctttcctgcatgctgcggagaaacagaatgcccgcttttcttccctgcagttcggccgcttttaaagcgagtgcggcaaggtagggcgatgaaagaggctgatcctgctcaagccaaaggcttccgtcacagggcatcccggaacggttcgcaattttttcccaagcttcggcaagaaggtgttttttccgcttttgcttattcagcgatgtaatgctcgcggaaacaatgatccgcagcgtaaaaaaacgaccgtatttgatttttaatttttttatggcgggctccagcgaccagcattcaggacataaagggtcgacaaacatgtaaatttcgagcggtttttttggatgtccgtggcaatgggcgaagtattgctcatgctgataattcgtcaatatgatcgatcctccgcttctgactggtttaccatatgcctggccgtcagttccagacgcccgtacagaaattcacgaatatcgccctccagcccgacctgatccatcgctttgctcatacagcttagccacgcatcagccctctcgtccgtaatcggaaaggggagatgccttgccctgagcatggggtgtccgtgctcttcagtataaagaggaggtccgcccaaatactgggttaaaaattgcttttgttttctggccgtttcagtcaaatcacttggaaatatcggcttcagcaagggatgagacgagacacgctcataaaaagtatcaacaagttgcgatagaagttcctctccaatcgcttcatatggtgcgttaaacgattgtcccatgttgactactcctttatatggctaataggaatcataattcccattgcgaatttatctttcagttttactatcttcagttactgtatattttagcaataacattttatttctacaaacaaagtgcctttctgtcaggcgcttgtatttcatatcatatcacatcgccttcattcatgtgtaagatttcactccgcaaaaaaaccagagggcgaaggaagcctctctggtttacgcgtaatactgtttggttatgtttttgacatattgctgtgtttccttaaacggcggaatgcctccgtaccgatctacgttgccggggcctgcgttgtaggcggctaacgccagagatacatttccgtcgtatttcgtgagcatctgctttaagtactttgtgccgccctcagcgttctggacgggatcaagcgggtttgacaccccgagtgattctgccgtggaaggcatgagctgcatcagtcccattgcccccgcaccgctgaccgctttcggattaaagcctgattcctgtttaataaccgcgcggatcagcttttcgtccactccgtatttttcagctgctttctgaatggcgctgtctattgaaaagtttccggtgctgatatcagaagccgcatccggagacttgatgcccggggaagcggaagcggtctgtgaagcagccgcggagccggatgaaacgggaattctcggtgaatatgaagcgtgagcggtccgcacaccgtttaaaattcccgattccggctgctgccggacggctgtgtccgtatactggctgagcagcgcgctgaaatttgcaagcgggctttctgaagattgtccgcctgaagccgtgcttgtatgagagattgattgcagcgccattgattgcagctggagaagggccgcccaattcgttatattcactgtgtcattccacctttttttgtttctgttcataaaaacgctggattttatttttcgtgattcgctctgggatgccgaattgcttgagcaattgttcaaacgcccgttttccttcatcccagtcagcagcctcgaattccaattcaaagtcttctttctctaaatatcggctgtgatctaaaatgattaagcctttttctgattctttttccgcgcgtgcggtcgacagcgtcccgaaatagcaaatgtgttctgagttgattccgagaccttccagctgacgtttgacggggccatccggaatcttgaagacgtcaagatcaggtgccgcaagctcttggtgggtttccagcagaccgaccgcggcaggctcttttaacgtcagaacgaacgcgccgtctttttctcggatgcggagtgctgattttttttgtttcagggaaaaatctttcgtgtcgaaataatgattgacctgctgtttaaaatcatgttctttcatgcagagtgcttcactcagcttcagaaattctgattttgtcagcaggtttttgaattcaatttctatttcttgggtcatgacagtcttcctttcaggacgaaaaattgtataattcccattatctctttagaggttacgtttatcaatatcgaccttgatatgataaaataaatgctgtactttgttaaaaaaggagaacattatgcaaaagagaattgaaatccaaaatgcatcattaacagaagacgcgctccgcttgaagtgcggagaggacttaagcggagcggaacgcaaagcctcaggtcaaatgcttgttgattccgatcactttgcttttgtatacatacttgaatcagctgactcttttgaatatgtcattataaaagaacatatctggccggatctgaaagaagccttagaccaaagaaaaccggcggtccttgaggccggcggaaaaacggttgaactttcagggctgcatgaagaactcgattatcttcttgaaaatattaaagataatgcaaactacggagatatggaagaaaaagtgaaaaacgtatttctttagaacaggttcggaattgggggatgtacgatggatgacaaacaatgggagcaatttctagcgccataccgccaggctgttgaagaattaaaggtgaagctgaaaggcgtcagaaccctttatgagtatgaagatgaccactcaccgattgagtttgtgacaggccgcgtgaagccggtggcgagcatacttgaaaaagcgagacgaaaaagcataccgcttcatcagattgaaacgatgcaggatatcgcggggctgcgtattatgtgccaatttgtcgatgatatccagatcgtcaaaaatatgctgtttgccagaaaagattttaccgttgtggataagcgggattacatagcagagcataaggaaagcggatatcggtcttaccaccttgtcgttttatatcctttacaaacaacgtccggtgaaaagcacgttcttgtggaaatacagattcggacgcttgccatgaacttttgggcaaccattgagcattcactgaattacaaatacagcgggaacattcccgaaaaagtaaagctgaggctgcagcgggcctcagaagccgcatcccggctcgatgaagaaatgtcagaaatccgcggagaaatccaggaagcccaagccgcgttctcgcgaaagaaaaaagcgggagaccgccagtaggaaaggaggggaatggcatgaaatttgccgtttcttcaaaaggagacgaggtttcagatacactgaaaagcaaaatacaggcgtatttactcgattttgatatgaccttggatgaaaaagagccggaaatcgttatttccgtcggcggtgacggaacgcttctttacgcatttcacaggtacagcgaccgtcttgataaaacggcttttgtcggagttcacacggggcatttgggtttttatgccgattgggttccgcaggagatagaaaagctcgttctggccattgccaaaacgccgtatcataccgtggagtatccccttcttgaggtgattgtcacttatcatgatgaagagcgtgaggagcggtatctggctttgaacgaatgtacgatcaaaagcatagaaggcagcctcgtcgctgacgtggaaattaaaggccagctgtttgaaacgttcaggggagacggtttatgtctgtccacgccttccggaagcacggcttataataaggcgttaggcggcgcaatcatccacccttccatcagggcgattcagcttgctgaaatggcatccatcaacaacagagtgttcaggactgtcggctcgccgcttttgcttcccgatcatcataactgtgtcatcaaaccgagaaacgacgtcgactttcaagtcacaattgatcatttaaccttgctgcataaggatgtcaagtccattctatgccgtgtggcaaatgaaaaagtcagatttgcaagattccgtccttttccgttttggaaaagggtgcaggactcctttatcggaaaaggcgaatagaaagaggaaacggattggacaacttttttatccaaaagaacatgactgcccgggaagccggcatgacggtaaaagaatatacggcgcagctcggcatttcaaagcggcttctcgctgacattaaattcggcgggggagacctgcttgtgaatggagagcatgtaaccgtccgcgccgtgttagcggaaggagacgtgcttaagattgaatttccgaaggagcatgtgagtgaaacgcttttgcctgagccggttcctcttgatattctttatgaagatgaccatgtgcttgtgatcaataaacagccgtatgtctcctcaattccatcaagagaacacccgtcggagagcatcgctaacggagtgatcagccactaccgaaaaagcggcatacaatcaacggttcatcttgtcacccgccttgacagggatacatcgggggcgatgctgatcgccaaacatcggctttcccattctcttttgtcggcagcgcagaagaaggggcttgtcagcaggcggtatctcgctgtcgtacatggggtcatgctgcagaaggaaggaacggtggacgcgcccatcggaagaaaacacgacagtattattgagcggatggtaacgccggagggacaacgagcggtgacgcattttcaaacggaaaaagcgggacatgcgtttacgcttgcagccctgcggctggaaacggggcggacgcatcaaatccgggtgcacatgagctacctcggccatccgttagtcggtgatacactgtacggcggaaaaaatgagggaattgcccggcaggctcttcacagtgagcggctttcattcgtacaccccatgaccggagaaacgctcgtttttcaggccccggtgcctgacgatatgaaaacattaattgaacacgtgtaaagcccgaaccgtttaccggtttcgggcttttttttatgcctgccttccgtgatcctcgcgaaatcgtgaggcatcatagggcattgagctttccacagagacggtttcatgctctggaaagcgaaagcctgtcagttgattgccgaagacgcatcctgtatcaatgttgattgtacggttgacgatccgggggcgttttaccggggtatggccgtaaacaatccatgccttgccttcataagcggcggcccagtctcttctgacgggtctgccgtcgggatacgtttcacccgtgatatcgccgtacagaacaaattcttttaccttacgcgagtatttaccgatatcgtcagcttttatgccggcgtgagcgacgacgagatcgccattatgtaaaatgtcataaagcggcgctgactcatataagcggatgaattgtctggagacttccgttctgtcggcgggagacagctctttcagttcggctgccgtcgtttccagtccgtgcatcacttttacggggtttccttttaagtaacgatacagtttgttgcaatgatttcccgggacataacggacggctcctttttcatatgcttttgccacaaaacgcatcacttctacggattttgggcctctgtccgttaaatcccccgcaaagacaagcgtcctgccttcagagtgaacgggcgttccgtctttcacttcatatccgagcttttgcattaacgcgatcatttcgtcataacatccgtgtatatcgctgatgatgtcgtaagccattcgtgtcagcctccttattaacggttttttatttattatggggctaattcctatacctaattacgctgtttttgcacaaattaaaaaaagaattgaagaaataaagccttatcacttttttttcgcgttcagccttgttagaatatgcgttatgtttttaaaaaaaagtaaggtttcgcccgcttaaagcgggcttttataacccttgttttaaggaggtatttacgaatggaacacacatcagtcgcatctttagtcgtcgttctgatcgtcgcttttttgacgccgctccttttacatcggtttaagctcagcatccccgtcgtcgtcgcggagatcatcatggggcttattatcggaaaaagcggcctgaatcttgtcgttcagggagacacgtggctggagacgctgtctgttctcggctttatctttttaatgtttttaagcggcttggaaattgatttttcttcatttgagaaagggaagaaaaaacaattccttccgaacggcaaggaagcgcccaacacgttttctgccgcactgattatctttttcggcatctttattttatcattgctgctgtcctatgcctttgtattagccggttttattcaaaacgcatttttaatgacgcttattatttcgacgatatcactcggtgtggtggtcccgactttaaaggaagaacggattatgaactccaatatcggccagatcatcctgcttgtcgccgttatcgcggacttggctacgatgattctgctcgctttcttctcttctctttacggagaagacagcggaaatatgtggcttctgttgattctctttgccgcgggggtcgtgctgtatttcttcggcaggatctttaaacaccgttcatttgtgcagtcgatgtctaaaggcaccgtgcagatcggcacgagagccattttcacactgattatcgtgcttgtcgctttatcggaatctctcggggcggaaaatattctcggcgcgtttttggcaggcgttctggtatcgcttctgtctccgaataaagaaatggtggaacagcttgattccttcggctacgggtttttaattccgatctttttcgtcatggtcggggtgaaattggacatttggacgcttttccaagatccgaaaacgttaacgatgattccgctgcttctgcttgcgctgtttatcagcaaaatgttcccggtgttttatttaaagaaatggtatgacaaaagaaccgtgtttgcttcgggctttttgctgacgtccacgctgtcgcttgttatcgcggcggctacgatcggagaaaggctccacattatcagcgccaatatgtccggcgcgctgactttagttgcggttattgccagcatcatcacgccgatcggctttaagaaattatacaaacggcaaagtgcgccgcaggaaaaaaagcgcattacatttatcggcgccaaccagatgacgcttccggttacgctggaattgcccgatgaggaatatgaagtacgggtcgtccatgtgtatcaggaaaatgccggggaaacgcttgcggaatccgttttttcggttgacacgatttctgattacgagcccggaacgcttgagtcgcacggtattttcaaaacggatattcttgtcgtggcgacgggaaatgaagatgtgaacgctgaaatcgccttaatagcgaaagagaaagggactgagcgtatcatcgcaagcgtcggctcggttgagcatgaaacaaaactgaaagatgagggcatcagtattttttctatccttctgtctacaaagacgctcttgcgcgcattaattgaggcgccgggcgtgatgagcctcctgacgaatgaggagtcttcgttatatcagatcaatctggaaaacccggcgtataacggcatcattctgcgagaatttccgctgatgggcgatgtgattttcgtccggattttcagaggtgtggacagcatcgttccgcacggagacacgcggctgaaaacaggagaccgtctcatcgtcacgggctcgcgcaactacgtgtcggaactgagaaaaatccttgaagcttgaccaaattgcaattcgtgataatatagaaggcataacaaataaatcaataatcgtatgaccactaggggtgtccttcataagggctgagataaaagtgagacttttagaccctcataacttgaacaggttcagacctgcgtagggaagtggagcggtattttttgggggttccttttatccatttaaattccaaaccacttttccgatgcgggaaggtggttttttttattttatcaggggggaagacataatgacattttctgaagaatgcagacaggcggctgccgaatggtgggacggaagttttgttcatccgtttgtaacgggaatcggtgacggaagcctgccgatagaccgtttcagctattacgtgctgcaagattcctactatttgacgcattttgcaaaagttcaggcgttcggcgccgcatatgccgaagacttgtttacgacgggcaggatggcgggccacgctcaagggacatatgaagcggaaatggcgctacaccgcgagtttacggagcttttagggattacggaagaagagcgtgcggcatttaaaccggcaccgaccgcctattcttatacgtctcatatgtacagatcggtgatgagcggcaattttggagaaatattagctgcgcttctgccctgttattggctatattatgaagtcggcgaacacttaaaggagtgcaaaccggagcatccgatttatgaaaaatggatcggtacatacggcggagactggttcagacagcaagtcgaagaacagatcagccgttttgacgagattgctgaaaacagcacagaggacatccgcgcgaaaatgaaagagaattttgtgatttcaagctattatgaatatcaattttggggaatggcctatcaaaaagaaggctggtccgagaagggcggaaaagaggtggaatcttttggagctgcacgcggtaactgataatcgcaaatccgttgccgagctggccgaggatattctttcgattcagcgcgaagtaagctttatccatatccgtgagcgggataaaacagcgggagaaatcatgcagcttttgtcccttttgaaaaagggcggtgcggataaggacaaattgatcatcaatgacagggcggatatcgcgctatttgccaatatacaccgtgttcagcttccgtcccgcagcttttccgtaaagcaggtgcgaagcagatttccccatcttcatatcggacgttcggttcattcgctgaaagaagccatccaagctgaaaaggaagatgcggattatgtggtgttcggccatgtatttgaaaccgaatgtaaacaaggacttgaagcaagaggcatcagcctgctttcagagatcaaacgcacgctttccatccccgttatcgcaatcggcggaatgacactgcagacgatcggacacacaaagcaggcgaagccggacggaattgccgtcatgtcaggcattttctcagctgaaaatcctgaggaggcggcaaaacggtatgcacgcgcggtaagggaggccgattatgaagaagcactatgatacggcggtgatcggcggcggaattatcgggtgcgccatttcttatgagctggcgaagacgcagcaaaacgttgtcttgtttgaagccggagaagtcggccgaaaaacgacaagcgctgccgcgggaatgctgggcgctcatgcggaatgtgaaaaccgggatgcgttttttgattttgccatgcacagtcaaaggctgtatgaagcggcggggcaagagcttgaggaagcttgcggcattgacatcaggcgccataacggcggaatgcttaaactggcgtataccgaagaagatatcgcccgtctgcggaagatggatgatctaccttccgtcacctggctttcagcggaagatgcccttgaaaaagagccttacgcttcaaaagacattctaggcgcaagttttataaaagacgatgtccatgtcgaaccgtactatgtttgcaaagcgtatgcaaaaggggcgcggcgctatggcgctgacatatatgagcatacacaagtcacctccgtaaaacgagtgaacggagaatattgcatcacaacgtccggcggggatgtctatgctgacaaagtcgcagttgcaagcggtgtatggagcggccggtttttcagccagctcggcttgggacagcctttttttcctgtaaaaggagaatgcctttccgtgtggaatgacgataccccgctgaccaaaaccctttaccatgatcattgttatgtcgtcccgagaaaaagcggccggcttgtcatcggcgccacgatgaaacagggcgactggagcaatacgcctgacatcggaggaattgaggccgtcattgcaaaagcgaaaaccatgcttcccgccatcgaacatatgaaaatagaccggttttgggcgggactcaggccgggaacaagagatggaaagccgtttatcgggcggcatcctgaagacagcgggatcatattcgccgccggccattttcggaacggcatcctgttggcgccggcaactgctgaaatggtgcgggatatgatcctggaaagacagattaaacaggaatgggaagaagcgtttcgaattgatcgcaaggaggctgttcatatatgatccttcagctgaacggaaaacaaattgattggaatcaaaatgaggggacggttcaggatttgcttgaatcgtaccagcttgatcaaagaatcgtagttgtggagagaaataaagaaatcattgaaaaaaagaattatgaaaagacgagtttgtgtgaccgcgatgtcatagaaattgtccattttgtaggaggcggatgaggatgttaacaataggcggaaaacagtttcagtcaagattgctgttaggaacgggaaaatatccgagttttgagattcagaaagaggcggtggccgtctcggaatcagatattttaacctttgcggtgcggaggatgaacatctttgaagagtctcagcctaactttctcgaacagcttgatttgtctaaatacacgcttctgccgaatacggccggcgccgcaacggctgaagaggcggtccgaatcgcaaggcttgccaaagcttcagggctttgtgacatgataaaagtagaagtcatcggatgcagccggtcacttttgcctgatccggttgaaacgctgaaagcatcagaacagctgctcgaagagggatttatcgtgcttccgtatacgtcagatgatgtcgtgctcgcaagacgtcttgaggagctcggagtgcatgccattatgccgggcgcttccccgatcggttccggtcagggaattttaaatccgctgaatctttcctttatcattgaacaggcgaaggtgccggtcattgtcgatgccggcgtcggatcttcaaaagacgccgcctacgcgatggagctcggggcagacggcgtgctgttaaataccgctgtgtcaggcgctgatgatccggtcaagatggcccgggcgatgaagcttgccgtagaagcgggccgcctttcttatgaagccgggagaattccggtgaaagattacggaactgcaagcagtccgcgagacggtcttccggtatgacggacagatattccagacaggagctgtttcagccgatcggtccctccggccaagagaagctccggtcgtctcatgccgtgattatcggcgcgggtgcgcttgggacggcaagtgcggagatgcttgtcagagcaggggtcgggaagataacgatcgctgacagagattatgtggagtggagtaatctccagcgccagcagctttataccgaagacgatgtcagacaggaaatgccgaaagccgcggcggctgaaaaacggcttcgatctataaatagtgatgtagaggtcgagggatttgtcatggatgtcactgcggaaaacgcacccggattgattcgtgatgcctccctcatcgtggatgccgccgacaactttgaaacgaggctgattgtgaatgatgcggctgtacagaaagggattccctttctgtacggcgcctgtgtcggcagctacgggctctcttttaccgtcattcccggtgtcacgccgtgccttcactgtctgcttgaaacattgcctttaggcggtatgacatgcgatacggcgggaatcatcagcccggctgtattgcagacggccgtttttcaggcagcagatgcgctgaagctgttaacgggcggatctatcgagcatgttctccgttcctttgatttatggaaaaatgaacggtcagaaataaacgtcgcccgtcttaagtcggctgattgcccaagctgcggcacaaacgattttccgtttttatcctatgaaaatcagacaaaagcggcggttctgtgcgggcggaacacggtgcagatcagaacggggatctccgagcaggttgatctgcaaaaacttgcgggacagctcagacggacagggcttgatgtttcagccaacccgtatttaatttcgttttgcacagacaatttcaagatggtactgtttcgtgacggcagagcattaatacacggcacaagtgatatcagcagagcgaaatccttttatcataaatggatcggataatgcgaaaggagagaaaaacatcatgagcatatgcaaagcattgacgattgccggatcagattcaggaggcggcgccggtatacaggcggatctcaaaacctttcaggagctcggcgttttcgggatgtcagccattacagcggtaaccgcccagaacactttgggtgttcacggcatttatccgctcacccgggaagcgctgggcagccagattgacgcggtggcggaagatttgcggcctgacgctgtaaaaacgggaatgctgtggagcgcggaaatgattgcggaaattgcggaaaaaacggatcagtacgggcttgatcatgtcatcaccgaccccgtcatgattgccaaaggaggtgcttccctgctgcgtgaggaatctcaggccgcgttaaaagagctgttaattccgcgcagctatgcggtgacgccgaatgttccggaagctgaggtattgacgggaatggaaatccgcacgtttgaggaccggaaaaaagcggccgaacgcctttgcaagcttggtgcaaagcatgtcatcataaaaggcggacaccagcctgaacaggggaggatcgttgatttattatttgacggttcgtcttttacccaaatcagccacgcttatattgacaccaaacacacccacggaacaggctgcacgttcgcagccgcgctgacggcggaaacggcaaaggggaaaaacattcagaccgcgtttgagacagccgtcaattttgtgcgggaagccgtggaacatacgcttggcattggagagggacacggcccgaccaatcattttgcctttaaaaggaacagtctgcagacgagataaaaaagagaccgcttcaacatccgcggtctttttcccatgctttcaatctggacaaggttatgatatgataaaaattaagatcaggtactaaaactatgtctttaagacgattacaggaggctttatacatatgaatttctcacttgaaggccgcaacatcgttgtgatgggcgttgccaataaacgcagtatcgcatggggaatcgcccgttcgctgcatgaagccggagcgcgcctcattttcacttacgcgggagagcgcttggaaaaatcagttcatgaccttgcggctacattagaaagaaatgattccatcatccttccgtgtgatgtgacaaatgacgctgagatcgaaacttgctttgcgagcattaaagagcaggtcggcgtgattcacggcatcgcgcactgcatcgcgttcgcaaacaaagaagagcttgtcggcgaatatttaaatacgaaccgcgaaggattcctgcttgcgcataacatcagttcttactctctgacagcggtcgcaaaagcggcgcgtccgattatgactgaaggcggaagcatcgttacactcacttacctcggcggagagcgcgtcgtttcaaactataacgtaatgggtgtggcaaaagcgtctcttgatgcgagcgtcagatatttagccgctgacttaggaaaagaaaacatccgcgtcaacagcatttcagcaggaccgatccgtacgctgtctgcaaaaggaatcagtgatttcaactccatcctgaaagaaattgaagagcgcgcgcctctgcgccgcacgacaacacctgaagaagtgggcgacacggctgcattcttgttcagtgacctgtcaagaggcatcacgggcgaaaatcttcacgttgattcaggattccatattaccgcacgttaaataacaagcagtccctttcagggattgcttttttctttcttctgattttaatcattccgtcatataaataaaacatgacagaatcggagggatgaagatgtcaaaacaaaacagaaacgcggaaaaaaaaccgctcatgtatattgttcaggcggattattcagacacgcaatcatcaatgcaggacatattaatcaaaaaaaggaaagcgcctcagctgccggaagaagagccgatgcatggaaagcgggaggaagaatgtcaaactcagcctgaaggagcagtggctgtcgaaccagaaaagcaagtacctgaacagcacagccgcgcagaagaagccgttcaagaagttccggcgcaagcggagcaggacactgccaagcccgacgccgctaaaaaagagcctgatgccgctaaaaaagagcctgaagcggttcacaatgccgccccagaggaaaaggttccgccaaagcgcgtgaaaaagccgatgagcagaatgtccattcttgaaaaaattgatttcttaacgaagctgccgcataatatgccgcggaccctttgtctgatagaagccaacgggaaaacctacagaggcgtaatcgtcggcagaaaaaataatgcgatcttcctgcggacgacaagcaacggagcgccggcagaactcgcaatagacgatattacctcgctgcatccgcttggattttaaccatacaaaaagctgcctgaattctttcatccggcagcttatttttatgctttttgatttaagaatgtgtgcggttgatcagtctcgggttcaggcaattgatggcgcagaagctatggagatcgacttcaacgcaatagttcgttttttctaaacggaatacatcgcagagagagtctttatctgtaaaatcaagaatgtgcttatgctcgtcaaaagcaataagcaggcttaatgtggcacagccgtcacagaccctttcaactctgaaaaaaacggtattaaagcacggaccgttatccagctcgccgacgtttccgaatgcggtgaacggtttcgattttgaggtgaagatggcgaacggcactgtatcgcctaatgtataagccggagataaaagtttagaataacagcctgtcgggcaatcttcttcaaccgcattttgcaggtcttcaatattttctaccgcttcacgcacacagtatgttgtatgcttgctcataatatccctcctgacttcacgttttaaatggtaccggtttaaacgatatcggagagtcagccgcccggaagtccgggcgggctgatgattgcatctgtaatagaaggttggaaggggattcttctttaggaaagatgcgaatcaatgactatccgtgatgctttttctctttgtgcggcgcaggccggttaacaagctcgggtgaaaggcactgaatggcgctgaagcagctcagatcaacttcaatgcaaaattctgttttttctaaaccgaagaaatcaggatcacaaggatggcagacgctgagggtgtcgccgtgcacatctacggggcgcaatactgaaagcgtcgcgcagcaatcgcatagtctttctacacgaaagaaaatggactcaaagcactggctgtcatccgcaaatcctccgacgttcccgaatgtggagaacaatccgccttttttatcaaatacgagaaacggaatggtgtctttacctgcaatcgtcgggctcaaaagattcgtatagcatccagtcgggcattgttcttcaacagcctcttgttctgctaaaatcttctcgactgcatcgcatacacaactttcatctcggccatggtgttttccgcagctcatggatttcagctccttcttttagggtatttgacttttgtctttaacaacatatgtacgcgagcctcacttggtgtgggtgaacgtctatatattcatcatatgcggagaaaataagaaaaagcagagcatttttagctctgctttttctttttagaggacaagggtgatgactaagacagcaatcagtaaatttgtcgctgttgagatcaatactgcgatatcggcatctactgttgtcacgtttacgccgcgggagttttcgatgagcagtttttgacggttgatttgtttgttagctgttagctgcaataagtcttgtgcgaccaattcagcgatgactccgtcagcgattgaagtgagagtggccgttacgactgctgcattaatcgctgtcatgactgaagcgactgcttgaacgtctgttgacgttacgttgatatcacaagagtctctgataataatcgcttcttcagaaacttgtttgttgatattcgcttgagcaaggtcttggtcaaggaaggcattatcttcgccgaatccgtttccgttacagcaaacactgcatcttctgccttctttttcttctttttcttctcgcggatgttcgcattcaggatcaagtgcaacccaagagtatggtctgctttccatatctattcctccttttcttttactaatattaaatgagccggccccttactttgactcaggcatctatcctgataaaaatcactattttttagttattgaccgggattttggcgtctttgccggagctgttcgattaattgttctctgcgggtttgcggattggtctgctgatcttgcgctttttcctgctcttttttctgtttctggctttcaagaaaagcttctgtttttgcctgcatgtctttgactaatgcgatcagcatttctttttcttcatcaggtatttcccgcattttatcttttgtcacgccgtgttttttgaagacattgctgacaagcacctttaaaagcggatccacttctggtagattttcgagttctttttttaatttttcgttatctgccatttgttctcacctctatttaaatatttgaaaagaaaggttaaaggatgtctagttcagcaaaaagtatatttaataattgaaacaaaatttgtacaaaggccataatatcgtctgcagtcagtgtgattttaatattgcggctgttcaggacttgaatgacggtcctcttttttatttggcaatcatccaggatcagcagttcggttgctatttggtcggctgtgtcttcatctgcgatcgcgagctgtgtcgcgaggataatcgccgtagtaactgaggcttgtatagaaagagcggccgttatatgtgttgtatctattgtgacattttcgcaatcaatcacttcgatcgtctgctcgaattcgttggataattgttcgtatatttgcggttgcagtgtttcgactttttcttcaaacgacataaccttcactcctttctcattcatactttatataatgcaaatgaaacgccgagcggaataagaaaaacaactaaaccgcacctatttttttaccggacaaggtgcgattcatgaagatcagggttttcgcatatgtataaagaggtcaagttttgaaaaggagtgaacaggtggttatcaattggctttcatttattctgttatcgtttgccgttttccggctggccaggcttttcgtatttgacaccattatggcgccgcttcggagcctttttcacgaggaaaaaacagaaaccgcacccgacggcacgacagaaacctacattgtcataaaagggaaaggcatcagggcatttatcggtgaacttctcagctgctactggtgtacgggcgtgtggtgtgccgcctttttaattgcggcgcagattgtgatacccggggccgcgcaatggctgattttgctgttagccatagccggcgcggccggaatcattgaagctgcggtttctcgtcttctgcaggaataaggcggttccaccagcaacttaccgtcactttcggcataaactggcatatatgacataaggaaaggaaggatcaccatgagtcaatcaagcaaaccttcccaacattctccatacaaatcaactgtgcatcagccttacgaaaaaaaaattaagaaaaaaggctgcggctgcggccaaaagaaaaaaccgaaatagccgttttctaaaaaaccggagcttccggtttttttgttttttgccgaacgccggcctctgttcggcatagatcataggaggaggggatgttatgaatatatttgaatcattcataaacggtaaataccgccggcacaatcaaaaccagcgggagcatgacaaatatatcttatctattgaaaaacagctgtctgagtttgatgaagcgggatcgcgctttgaggaatggatagatgtgtttgccgccgaaacagaagcaaaactgaagaaaaatgagcattctcactaaaatgaacgaaatccgcaccggccctatgcatttatccaagccaaacaagtcggctcacatagagtatagagagtaaaggaggtgcttagatatgggattcggatatggcggattcggcggcggctacggcggttatggcggctgcggcggatacggaggcggctatgtcggaggcggatacggctcaacatttgttcttgttgtcgtattgttcatccttctgatcattgtcggtgcatccttttttggctaaaccttagcaagaccttggataagcgcgggaccgttcagtcccgtgcttccctgatgtatgaaggagtatagagacggggcactcggaattttttccttgtcttacgggcacatgttccgctctttattcatacaatatcgtattactccacaaaaggaggcacaccatggataatcaatttttcaaaaatattgagaagaaaacaggcgtcagcatgaaggatgtcatgaaccttgcaggatcattgcaaaatgccaatttcaaagatgaaaacacggtgagaggcgtcattcagaaggtgtcccagctggctaacaagcgtgttccgaaagaattggaagacaaaatcgttcaatctattacaagcggtaaagagaaacttgattttggcaccatttctaaaatgctgaacaataaataggcgtcagccggccttgctaaaaaggcctttttatgtgagaagaacccggcagtgatctgccgggttctttatatcctgagtgcgctccgtctgtccgtccgaagaaggggctcgagaaatcttgagctgcgcgctgtttttccccgcctgtacgcgggacaagatacatataaatgctgcatggcccttgtcattgcgacatacagaagccgtctttcttcttcgagcggagcgggatcgccctgtctcgccgtctcaagcgcgaagtcatgggggatcgagccgtcagccgcgcctaaaatatagaccgtattgaattcaagacctttagagcggtgaatggtcagcagttcgacgccgttttcatcggttttcagattctcagcggcgcgcatatgatcgacatgcgcaagaaaatcgggaatggttttgaattttttggcggccactttgacatccctgagatcatcagagcctttttccagtttgtttccctcattgccccgtttttttaaatactcggaaaaacccattttgctttctgcaaaggtgatggcttcaaccggcttcattgtccggatgcttgcgaaaaacggaacgatctgcttgatcttccctatttgaaaaggcttcaggtcaggcagtttcgtcagtgccttaatcatcgtgcaatcttccgtaattgacagcgcctttaacgtttgcagggcggattgctttaaaaataaggcgggcagcaggtctttcaccgcatccggatcatcttcattctgactcgcatataagtaggcgaggatctggcgtacgattctgcggctgtagaacgtctgcacgccccggtcggcatgataaggaatcgatgattggtgcagtctttcataaatggcccgtccggcgctgtttgtccggtaaagcacggcaaaatcgtcaggactcgccccgttttgaatcttctctttcatatccgaaacgatcatggtcgcttcttcttcttcatcgtaaggataaaacatcacgggattgtgaacgccgtctttgacggcagaaagtgttttttcataccgttttttatttttctttacgacggcatgagcgcttgagacgatcggatgcggcgagcggtaatttgccgttaagtaaatggtctttgctgccggataatccttttgaaagtcaagaatgaaagacgggctgctgccgcggaacgcataaatggattggtcgtcatcacccacgcagcacaggttattctctgggcttgcgatcatttgcataatgttgtactggacaggattgatatcttgaaattcatcaatcaaaatatgagaaaatctgttttggtactgcgcgagaatatcaggccggctttgaaacagttcataacagccttgggccatgtcatcaaaatcaaattgccgtttttcccgcttctgccgttcgtaatgttcgtagagcctgtacacttttttctcccagtcgtccgcaagcggaatggtctcatgggggagatacgtgtttttccagcagccgataagctgaagcgcctggtcgacgggaaactctttttcatccaaattttcttcatagagcgcctttttcacatattgctctttttgccactccatttttaaaagctggctgccgttccattttgaagaatcataatgatagagtattttatagaaaaagctgtggaatgttcctgtcacgagacgggagacttttccggctgccagaccgtactcatttgccatccgctctttcatttcggcgacggcttttgtcgtaaaggttacaagcagcatattctcaggtgaaatgccgaggtgttcaatcatatgggcggcgcgtgctgtcagcacccttgtttttccgcttcccgctccggcaagcactaataaaggcccgtccgtttcagtaactgccttcatctgttcacggttcaggccgatgccggggaacaaagatgtatcagccgcctcggatgttggtgaaaacggttcggccgcaggcacttttttcgggcttttccattctgagacgatcggtttcggattctctgaaatcgcttttcctttcggcaggcggaacatgccggcttccttatactcttctgtttctttctccgctagtggttccttggccgcgcatgctttttcacaggcggtgaagtctcccttttgccggtgataaaatgccggctgctctaaaatcgaaagccgcatcaagacgggctgctcacaatgtgcgcaaaaaatatttcctttctgagcttcttcaaaaaggaattggtaatgttctctagaatatgtatgtaaatgtatcgttcggttattcagtcgggcgcatttcaaaaaggggtcctcccattaaaaggtgttcatccatttgatagacaaagaatatcataacaaaagaacagcgtttcaaaaagtaagattaagggaaatgaaaagcgaaggggaggggtacatatgatttatgcaggacggattcaaaaccagcagtattctcaatacgcaaaccgggcagcgggttataagcctgattacgccggcattacgaaagcggccgccctcgccaatgacagggtgtacagagaggtggagcgccgccaggaaaacaccgcagccgcagaaaagaaagtacatgaggaaaaacgtaagcgctctctttcccgtctgccgcaaatcatgggaaaaggccggttaataaatcaatacgtgtgaaaaagcccggatatatccgggtttttttgagtcgtatatatgaaagatgcggaaaggaatgattcaatttgagaaagctttcattattaattgcggggttatttcttttcggcctctttactcccggaatgaaaccggcagacgcggcggagggctccgcagcaaaaggtgtcactctcacacagctggcgccgcatgtctggatgcatacaagcatcggtacggcagacggaagtcccgtccctgcgaacggattgcttcttgagacttccaaaggaatcgtactgattgatactccgtggaatgacagtctcacagagcaattaatgacacaaataaaaaagcggtttcccggcaaaaggatgaccgatgccattgtgacacacgcccatgatgatcgtatcggcggtctgaacaccctgtacaaatacggtgtaaaggtgcacagcacgaagctgaccgccgacttcgcccgacagcagggatatgaccggccgctcggagatctgaaaaacgtgacaaagctgcagtttggcgatatgaaaattgaaacgttttatccgggaaaagggcatacggaagacaatatgaccgtctggctgcctgaggataagctcttattcggcggttgcttaatcaaggctttagaaacaaaggaaatcgtgcctactcccggcttttatccggatcagtggccgcgcgccgtccgcaaagtcatgaaaagatatcaggacatcagcattgtcgttccggggcatggcagtccgggggatgaccgtctgctgccgcatacgataagccttctgaaagaaacgtaaaaaagaagaccggcgctcccattacggagtgccggctttttttatctcttcctgattttcataaaactgaggaaagcaagtgcaagcgccaacacggtatatcccgctatcggccaaatatgctgatgaaaggaagaataatctccggttatgacttcctgggccagctcgatcgagtgaataaacggtaaggcataagcgatatgtttgaatgtgtcaccgagcaggctcacctccatccaagccccgcccagaaattgcacgagtgtaatataaatcgttccgatacctgaaatttgtttgtccgtaaacacagcccctaaacataaaccgaagaaaacggacatcatcgcaatcggcagcaagacagcgatacctgcgagaagattcatccactcggcggataaaccggcagcagcagctgcgataaaacaaatgacgatttgtaaaatggctaacggcatcatcggcattgcataaccgatgacataatcggctgtttttaaaggggaagcaaacaaacgggtcaaaagggcggtctgtttgtcttttgcgatcagcaatgcagagaacatcgtaaggaaagcgaaaccgaaaacaatgagtccgggtgctaaatgctgaattttaaaggtatcaagcggcgcatttttttcaatcgccgtaaacagaaacaatagaataacaggcagtgcgattccaaggataatagacagggggtcacgaaaaatttctttgcggttgcgaatggcgaaatcaagcataaagacccgcctccccgtcacaaatcgctaaaaaggcatcttcaaatgtagctgaatgagtttgctttttcagggcctccgccgtacccagtgcttttaaagtcccattttctaaaatgcaaatacgatctgccagggcttcagcctcttctaaatagtgtgtcgttaaaataatcgtcatgtcaccctttaatgcctcaagatttttccacaactcgcggcgcgaacggacgtccagccctaatgtcggctcatctaagaaataaatatccggcttggtgatcattcccattgcgatgctgagccggcgctgcattcctcctgataatgttttggtttttgctctttctttctcttttaattgaaacaattcgagcatctcatctgttcttttttttgcttcttttttcggaattccgtagacaccggctataaactctaagttttcccgtacggttagatgaggagcgatagctgtttcctgcggggacatattcaatttcggttttattttatctaaatcagtcaaaatactgtgtccaagcactgatgcatcaccgtcatccggagaaaggagtccgcaaagcatactgattaatgtcgtttttccggctccgttctcaccgagtaaagcaaaaaattcccctttctcaactgagaactcaagacggtcaacggcggcggtttctttataatgtttcgttaattgcttcagctcaatcgcgtgcatttactcatcctcgctatctgcgtcgatttgcttagcgtttaaaatatcttttgcaaactcgaaaaagagttcttgtttaacaagtgcgataccttgctggtcatccccaagcataagcagtgaatcccccggatttatatcgaaaacatctcttgcttctttaggaatgacaatctgtccttttgtgcccactttaacagtcccgaatatgtgttttccttttggtgccgtcatgtttatccctccgaaatatgaattgtattttttgtatgaattgtaatacttcgtatactaaacatacattaaccttccataaaatgcaataaaattcatgaaatagtattattttcataaaaaaagcactcctgccatataacaggagtgcttttgattttatcgtttgtgttcctttatcatttccagatgggggatgcccgcatctggaaattcttcgccggatgtgacgcggtatccttgtttttcgtaaaacggaacggcctgcgtctgcgcatgtaagataaagctgtcggcgcccttggctgccgccgctttttcaagcgcctgcataatgatggctccgacgcctaaagaacgatggcttttcatcacgcagatgcgctctaattttccatgcccgtttttcaagcgccatctgccggctccgaccggctggccgccgtcatatatgactatatgctctgacgtgtcttcgaattgatcaatctcttcttcttccggaacgtgctgttctttaacaaagacctcttttctgacgaaaaaagcgtcgtttagctgtttttcagtttttgcgatgatggattccaagcagttattctcctccgcctaataaaaatgtttcgtacacagtccatgagccgttatccagctgatagagcaagtgaaaacggtcgatgacttcttcgtgggaaatgtccagcattttcagctgtccgagtacgtcggaatgttcatctgacgacagcttctggccgaccgtgacatgcggaacgaagctgtattccggctcgccggataatgctcctgagtagcatttctcactcagagattttaattcctccgtcggctctgctttcatatatatcacattattcacaggagaaaacgagctgtattttgtgattttcagaacgagcggatgcgactctttcgccgtctgtctcagctgtgatacgacctgctcgatttcctgttctgtcgcttcaaacggatctcttagcgtcaggtgcggaggaatgagcgcgtagctcgggtcgtagcgtttccggtacgaatttgcgagatcctgtaatttttttgatggaaataaaacaataccgtatttcatgaaagttccctccttaaatgaatggttacagcatttttttcagcgccggcgtgatgagcggctgccagtaggtccatttatgatccccgtcgaaggtttcatacgtgtattcagactgtttgctttccagcagctgtttgagctcttcgttcggcgcggtgaaatcaagaacctggccgtctgtcgtgtgaacgccggtttctttttctccgatttgatgataaacggaaatctgtttgagatcctccgactgccggacggcatccagcacgtgcccgtcaacatacggagactgcatgatgacgtttccaaacatgttcggatagtcaatcgccgtcataagcgaaacggttccgccgagggaatccccgatcatggtgcggccgtatccgacttgataagtcgggtattctttgtcgataaaaggaacgagctcatttgcgatgaaccgcttatatgaggcgaatttagagccttctggatggtatgtgtttcttcgctcccgcacatttttataagggacaccgataatgatgcagcggtcaatttccccttttgacataagctcttccgcctgccgcccgattcttcctaatctgaaataatcatggccgtcatgagcgatgaccgtatgatatttatacagaggggagaaggtggcgggcaggtagaccaaaacggtcatttcctcttcaagctcatgggagaaaagttttttctcatgaatgattccgttttttgatgccacttcgcattcctccaggccgcttcttgtcttgatggttttttcctattgtaccatgaattattagaaatttctttcttcagatgcacttcttgcgagagttcagataaataaaaagttattgaaattcattttatagtgcgttaatatagaacaatcagaaaatacaaaacaatattcttatcacgagaggtggagggactggccctttgaaacctcagcaaccggtttgctttgccgcgggaaggcaaagtgccaaggtgctaaatccagcaagcgattcacatgcttggaagataagaggaagagaaaagctccttcttcttatgaagagggggcttttttatttttgaaaaaggatggtgcttactgatgacgcagcatgttgatacaaaattagcccaaatcggaaatagaagcgaagaagcaacgggaacggtcagtccgccgatttatctgtccaccgcttaccgacatagaggaattggagaatctacaggctttgattatgtgcgtacgaaaaacccgacacgccagctcgttgaagacgctatcgccgtgttggaaaacggtgcgagaggctttgctttcagctcgggaatggcagccattcaaacgattatggctttatttaaaagcggggatgaattgattgtatcctccgatttatacggaggcacgtaccgtttgtttgaaaacgaatggagaaaatacggcttaagctttatttacgatgatttcagcgatgaagactgtttacgctccaaaataacggaaaacacgaaagcggtatttgttgaaacaccgacaaacccgttaatgcaggaggcggacattgaaaaaatcgcccggattacgaaagaagccggcctgcttttgattgtggataatacgttttataccccggtgctccagcgtccgcttgaactgggagcggacatcgtcattcacagcgccacaaaatatttaggcgggcacaatgatctccttgccggtcttgctgtcgtaaaggatgaagagctcggcgagatcatgtttaatcaccaaaatgcgatcggcgcggttctttcgccgtttgattcgtggcttttaatgagagggatgaaaacactcggactcagaatgcgccgtcatgaagaaaacgcccgtgaacttgcagaatttttagaacaggaagaagaaatcgccgacgtgttatatcccggaaaaggcgggatgctgtctttccggctgcaaaaagaggaatgggtcaatccgtttttaaaggcgctgaaaacgatctgtttcgcagaaagtctcggcggggtggaaagctttattacgtaccccgcgacacagacgcacatggatattccagaagacatccgtatcgcaaacggtgtctgcaaccgtctgctgagattttcagtgggcattgaacatgcagaagatttgaagcgggatgtaaagcaggcattacagcaagtaaaagagggggccgtgtcatatgagtaatcacaattggacgctggaaacccagctcgtgcacaatccatttaaaacagacggagccaccggagccgtcagcgtcccgattcagcatgcttccacattccatcagtcttcatttgaagaattcgggacatatgactacagccgctcaggcacaccgacaagaacagcgcttgaagaaacgatcgcaggtcttgaaggcggaacgagaggctttgctttcagctcaggaatggcggcgatttcgacggcatttctgctcttatcccaaggcgaccatgttctcgtcacggaggacgtgtacggcggaacattccgcatggtgactgaggttctgtcccgtttcgggatcgaacatacctttgtcgatatgacggacacagaagcggtcgcccgcgccatccggccgaacacgaaagccatttatatggaaacaccgtcaaacccgacgctcggcatcacggatattaagggcgtcgtcaaactggcaaaggatcacggctgtctgacataccttgacaatactttcatgacgcctgctctgcagcgtccgcttgatctcggtgtagatatcgtgctccacagtgcgacgaaatttttaagcggacacagtgacgtgctgtcaggccttgccgccgtaaaagatgaagagctcggcaatcagctgtataagctgcaaaattcatttggagcggtgctcggcgttcaggactgctggctcgtattgagaggcttaaaaacattgcaggtcagactggaaaaagcgagccggacagctgagcggctggctgcctattttgacggacatcccgccatcaaaaacgtttactatcccggccttgccggacatccgggagccgatacccataaacggcaagcgagcggagcgggcgccgtcctgtcctttgaattggaaagcaaagaagccgtcaaaaagctggtcgaaaacgtatcgcttccggtatttgccgtcagcctcggcgccgtcgaatccattctctcataccctgcagccatgtcgcatgccgccatgccgaaagcagagagggagaaacgcggcatcacagacggccttctgcgcctgagcgtcggagtcgaaaacgccgaagatttagagcgggacttcgaacaggcattaaaaaaaataacccctgcccaagtgagatcataaacgaaaagggcgccgtcaattttgcaacgcgccctttttttattttagataaaaaaagtgttgacgaatgagaaatcaggatatataattataaatgtcagagagacaacaacatacccagcaacatatacatatcatgattccgtagctcagctgggagagcgctaccttgacagggtagaggtcgctggttcgagcccagtcggaatcatagccaaaacccttgcgtagcaagggttttttactttgcttatttattgattttgtcatcattcatcgagttggggacgaattggggacgaaattatttttttgagctgattttgaagaagaatttcaaaatcaactctgtttttgtgctaggtttctaggatcgaactgattaaagtgttttactgtgctattttcgagtttctcggtaacatgaccataaatatcactagttgttcgagcactggcatgtccagctcttcgttgaatagcactgagactttcgccagcttccataaggagagccaccatagtatgccgcaagtcatgaagacgaacatcttttagaccgtacttcttttttattttagtccattttgcggtaggggttgtatagtagtaaggttttcctttaccactgtgaaacacatattgatgttctccgccttcccaggcatcgccaagcaataatttttcttttttccatatgcgataatatttagccagctcattcatataaaaatcaggcattttgacgaatcgttgagaactttttgactttgggcttttgacatgaggctctccgttaattgttttagaaattgatctatttacgtatattccacctttgtcccaatctacatccaagtgccattcacaggcaagagcttctcctctacgaagccccccgatcagagctgcaagataatataagcgccatttaatatctatttcatacaacactttaatacattcagctgcttcgtcagattcaagaaagttcatttctttattctcagcttctggcgaactcaatccctcaatagggtcgtcttttatcaatttccattcctctgtggcagttttaaataatgcttgtaagattttaaatatatctttgattgtttgatcacctaatccgccaggctttccatcttttctagccccatctttagataaatcatctataaaatcaacaatgtgaaggctttttaatttgtctatttttttatgacctaatgctggaagaatgtgattttttaagtgatttgaatatttaacagatgttgtaaaagagtaaggcttaccattcttattaaagagtttcttttcaacccacttctctacaaatgattcaaatgtagctttttctggggcgatatattcgccggcctctacttcaattctgaaacggtgcagctgatcctcaagatactcttgtaatttccgtttagtctttaatagctttggatcttctatacgaattgttttctttcttctatcccttttacctttggcatcgtaaccattctcaacaattaatctaaaagagttttttccacggggctctatactggccatttggctacctcctaacattcaatttacttatttgatgaagatttttatgccagagaattgaaaactgctttctgttgaatatttctagccgtttagcggccaaggaatatgtcacattaaatgtatctcctattaatttaatggcctctgatttaagacggggcagctgcatttttatgagcatgaacgttggtacgcagaagtgatacatgaaactgttcgcctggtattcctgaagctgcctgaacattctattcatgtgaaattggtttccagtatgttttaagacatggcatagctcatgaacaaagtcttgccactgttcttgtggagaggctcgagcatcaaggacaacgctatactcaccgttaatttgaaacatgcagctgtctctttgctcataatgaagccagatacgaaatgccgcggcaatcctttctaaatcaatgtcttgaggagtctcaatatttaatttgtaatagatttttttcacttcttcttcaaggtacgataactggattgacattaaaaacaccaccatgtagggaatgtatgttctgtttttggtgtgaaagaaaagcccgaggaaaaagggctgtcataaattcaatagctgtttctttttaatttcatattcttcttgagtgatagcatccatatccaacaattctttatattttttcaattcatcagctgcagatactgtaggggcaggagttggtggtattgtcggagccggcatagactgatgctcttctatgtaattttgaatttctaataccatgggcaattcatttggaccaaaagtgaaggagttttcatcttttgttgttgcatcccataacccgctagtttcattcgcagcaggagtcaaaaattgaaaataccctgaagttaataaaccaggttttttgatctgtactccagacaattcgctaattcgatacgacttttctccattgaatccctttgtaacagtgttgagaatccctttttgagaaactctaacataatttccatccagctttactgttgttttcgctactttaaagtaaaattctttaatatccttttttatttcctgttcaactatcgtttgtgcctgaatggctttttcttttttgagattgaatttttcctcattaccagtaatcttggattctacatatttgataaagccgtcaatatcaccttctgatattgaattgatgtttaagtcttcttcggctgttttaaaatcaatcttatgtccaattaatggcttgcgactggcagtaattttaattatttctttatagggccaattctttaaaattggttttttctttttcaaaacaatgaaatatacttgattttctgtagcaatgaaatgcccccatgtcgcgtcactcttcatagttccgcaaacgagttcatgaattgtttcatttctttcatcaatcagaggtttagctgcttcataagttttcacgaaatttttagaagccttcatgcgttttttaaactgacagttatagatttcgccattttccatcaaaaaagacaaatttaatttcccctttataagtaatacacttgaacatattttttctgatccgatcccgtttgaatccagatgtaatccggatgagaaagaattctatatcccttgatataactggcttcaacctactggtgaaaaattcttttccgatccagtttagatctaattccgatccaatcctgatcttattagtaaacagaaataacataataacaaataaatattactaaaggtttcgccagcttgttactttttaggcttacggccttcgcgttcttctttttctttaaggtactttataaaatcaatcgcttgtttttggctttcttctgagaaatcacgtgcttctctaaaggcaagttgtaaatcatcatctccgaatgcctgatcaaattcagatttttcttttgttatactcgaatgattatcaactctacctaaaagataatcagtagttgtatcaagaacatcagcgaggtcacgtaacatttcattcgaaggtgtactatagccagtctcatagtttgaaattgtagttttctttgtattaactttttcagccagctgggtttgagtaaatcccatggcttttcttcgttgctttaatcttttcggaagcatatttaacacaacctatcacataagttcaaatatattgtacatcaatataatgtaaaataaatataagtccaaaaaaatcaaacaaaaaggttgacatccaaataagttggatttatactaggtttatcagttcaacaaacttggatatttggtggtgataaagtgaaaaatcagaatttgattttagccagaaaggcaaaaggctacacacaggatgaattagctttaattttaaattgtaaaaaaacaactataagcaactgggagaatggcgtatctaatcccacactgcctaatgcatttaagttatctgaaatgcttggacgtgacattaatgatcttttttttaacctgaaagtccaagaatcccaaactaaaaatacggcatagaggaggtttaatcatgacacgcaatacattaactgtgcaggaaacagctgattaccttggcgttcatcatgacacaatttacacgatggtccgagaaaaacaaattccacacttccgagtccggaatcgcattttctttaccaaacataacattgatgcatggattgaagctcaggaacaagcgattatgaaggaggcgatagggtgaatcaactcgtcttcattgaaggtaatcaagttgtaacggacagcctgactgtcgctaaagtcttcgggaaacggcatgacacggtcctgcgggatatcagaaaccttgattccagcaaagaatttaatctccacaattttgcggaggttgactatcaggatgaccgaaaccgaacatacaaaaaatatctcataaaacgtgatggactcacattcttggtttttggttacacgggcgcaaaggccgcactgtttaaagaaaaatacattgcagaatttaaccgaatggaaaatgagcttcaaaggctcaatcagccctcttacatgattgatgatccgatcaaccgggcaaagcgatggatcacagaagaggaagagcggcaacgacttcagcacacactgaagattcagcagccactgatcaactttgcagagagttgtatggcatctgaaaaatcattgcttgtgagggaactggcgaagcttgcatctaaaaagggtatcagcattggagaaaaacggctgttccaaaagctacgcgagtggaagatgatcttggcaaacaagaacgagccataccaggaatatatcgaccgtggttattttgagatagcacagggagtgcgacaagtaaacggttcatctaaatcatggctgactatccgcattacgccaaagggacaggcctttatcatcgacaagctgagaaaacagcaagcaagctagttccttcattaattatattttaccagtgaacaactggatatatcaggaggcaaacatatggagaacaacccatacaatttgcataatctaccccggatcatgcgtagtgtccgcaaagcggcaggacttgcacagtatcagatcggtaatttgatagggggaaaggatcaacggtatgtttcggacgttgaaaatggattcagtaagcttaccccggaattatgcatcaagtggtttgaggcgtgcgaggcatacgaacatattgatctggtacattacctcttcaaactgcacccgacgacggcggcgccaatagatccagcacttaacgagagcgcaagcgcggcggtaatcaatatgattcaccagcttgaagaagcattgcaagcaacaaggcatttagcgcgctggctggcaaacgataggccaggccgacaacctgaagaactgcccatggccgatattaagcagatttttgatctgatcccggcaaacaaaacgctgatatattcgctggcccgtagccatggactgaacatgaaagaactggctgaaaggtggacgcggaaagcgttaatgagtcaagttgcaatggcaaaaacagaggaaaggcaggtggtgctggtatgaaaatcaatcagtttcttaaagcagatgcagattcagcaaaaaggaaaattgagtcggcggaaaggctctctatcatgctttcggaagcgttaagggatggcgattacgaagaagcaatcagtcttgcagggagcatcaaagttcttgcagaggatattaaccggatggcgaataaaggacgcttacaccaaaccgttttaaatatggcagctcgcgggattcacctgagtgttgtaggtaggtgttcacaatgaatattgaaaatccaatggttctgaacaactggcatgacaaggcgactgaaccagaaacaaaaaaggactttttcggggatgaagtaacgtcagcagataattatgtaattgacagcggcgaggtaatcttacaagacaatcttaaacgctatttgaaggagcaacttggatttaggtttcattcagcacaataaaaaaagcccactttgcagagtggacttcaaaaggtcttttggtaaagattagttcctttattataccaaattacctcataaaagacaatggaggttttacacatggctaaacgaataacagcatctttcagtgaccgagcggacgatcagaagcgtctgagacaagtcggcggctcggtcatgttcagtaaaggcaaaccggtattttccttcccgtcaatggacgcataccgagaatggcagcggctcggcacagaagcttatttgagaaaggtggcagaacaatgaatggattatcgcaggtagattactcagattacatgccggcgccccagcaggctactggcgtgactacagaagcgatggtaagccgacaggctcaagaagtacaggcggcaatggtcatcgcaaagaaattcccacgggacgtatacgcagcgtttgaccggattaaaaaagcatgcgaacggaggctgttggcagagaatgcggtgtatgaatatcctcgcggcggcacaaaggtttccggtccatctatccggctggcggaggccttggctcagaattgggggaacattgattacggaattatggagttggaacaaaaggccggtgaatcatctgtcatggcttacgcttgggatcttgaaacaaataccaggcaaaccaaaattttcactgtgaagcatgaacggaaggcgcggggctccattaccaaacttgatgatccgagggatatttacgaaatggttgccaatcaaggagctcgccgggttcgcgcctgcatacttggagtgattccgggcgacatcgttgatgcggcggtagatatgtgtcaaaaaacattgattagcggtcataaggaaccactggaagaccggctcagaagcgccttctccctatttaaaaaagaatttggcatcactaaggaaatgattcaggagtacatcggcagtaacgttgacgccttcactgagcaagatttcttgaaaattggtcgtatttacacgtccctgcgtgatgggatggcgaagaaagaggattacttcaatgtgaaggccacaggcgcgactaaatcaaaggctgaggaagaattcaaaaagcagaaagagcaagctgacaagcctgctgatagtaaagaaaaggcgggtgatcctgctaatgcggataccggcgctgagcaaggagaattattactctaacgagattgatagacactacatgtcaaattctcaatataaaagctttttgcaatgcgaggctgccacgatggcaaagttgaacggagaatggacgccgcctacatcggaggcgctcctcttcggccaatacgttcatgcctggcttgagggtgaacaggcttttgatgaatttaaaaagaacaccccatcactttttacacaaaagggccagctgtacaagcagtatcagttagctgacctgatgattgaggcaattcaacatgacgaactctgtatgttcattctgcaaggagcaaaggaagttattgtaacggctgaactgttcggcatcccgtggaaaggcaagctggacgtatacaaccctgccggcagccgttttgccgatctgaaaacagcccgttcactccgggagagggtttggcatccggaattaggctattgctcattcgtcgaggcaaatggctatattgcacaaatggcactgtatgctgagcttgaaaaaagaatgactggacggagcgaatggcttgagcccctgatcgtaggggtgtctaaagaggacccaccggacaaagcggtgatcaatatagatgaaaaccgaatgaaagtagaacttgaagagattgagcagcggatggatcggattttgcaagtgaaacacggcggagagaagccagagcgatgcgaaaaatgcaagtattgccgggccactaatcaactgaacagcatcatccatttttcggagttggtgagctaatggaaaaggagctgatcaggattcctatcccgcattgttatctctggctggtcaaaacggttcggcgcgacatgagaaaggacttgtatacccggtacacgactgactacttaaagacaaatgagccgtctctgagattagtagaaatagatttcaaggctctgacagcactgtgtgaaaggaagtaggtgagcggtatggatatgcaaggtttagggtatgtggtcctgcctcggctgacatttaaagattcacgcgatgagacaatatacgattatttattcaaacgggcggagtacagggcagatcaagaactaaagctcgggcagacaatcgttaagcttgtagatttagccaagcgcttcaactggtcttctgatcagatcaaatactcattagatcggatggtaaagcaagagtatttgaagttggaccggctgccgcaaaaacgcggtttcattgtgacggtgttgaattatgccgagtacatacagcttggaaattacaacaagaagatagacccggctccaatacctttaggacagcaggaggttgacgaaaaaatgaaaaacgcatttgaactattcgaaaacaaaacagcccgcacaattggcacgatggaggttcagcggctcgggtatatggtggatgattacggcgaagagaaagtcatggaggcaatgaaacaggcttttagaagtaagggcaacaacgtcaatctgaattacattgaagcaatcctctcaaacccattcagccagagacgaaaggagaaacagcagtatggaagctcgcaaaacgcaagatatggacgcggcaatgaaggccattctaaccaagctccgggatcggtcagcagcatcttcaacgggacaggccgcctcagaagaaaaggctgaatacgagtgctctgactgcaaggataagggcattatcgtttaccggattcaccaagacaccgagcgtcagctgagaaaagagcataagacaatggagagcctggcccccgatcaaatggtcagggaagaggattatcttgcggggaaagtatgcttgccggataaggcccgggaatggaaaaccacattttcaaagcaatgcgagtgtgtaaaacggaaaaagatcgcccggcttatgaaggccagcggcatcacggaggaattcgaaaagctcctttttggaaacttcattaaggacgggaagccggacatgatcaaggacgcttatgagtgcgcggtggaatactataaggattttcagagcatcaagggaaaacgttcaaacagtatcgctttgctcgggcagccgggcagcggtaaaacgcacctgttaacggcaatcatgaacaatctaatcaagaaaaaatcaatttactgcatgtatttcccgtatgtagagggaatgggcgatctgcgaaatgactttgaccagctggaaacaaagctcgacgccatgcggaaagctgaagtcctgttcattgatgatttattcaagccagtgaagggggagccgcgggcgacggattggcaagtggaacaaattcaatcggttgtgaattatcggtacttgaatcataagcctctgctaatctcttccgagcttgatacgggcgaaattttggatattgacgaggcgctgggctcccggattcatcaaatgtgcagagattatacggtgatcattaaaggcgaccggatgcaattaaatcataggttaggagattgggaatgacggaaaaagcgaacttcacagcaaccggcggcatgtatctgttcgggcccgccgagcaaacggccggccaggaccttaccccggcgatccgggtgcttgaggaaaaaatcaaacaaatggagctgatgtacagtgcttaaagcggttatcctgctgccggccatcatccttacagcgccgtacaaggaaaagcagattcagcactgggaacaaattgacgggaggtaatgacggttggattccattcagtttatagtttacggcgagcctgttgcacaggggaggccgaggggatctgttataaatggcaaggttaaaatgcgtgatcctttgaaatcaaagaattttaaacaatatgttgcactggtggcgtcacagtatcggccaaaacaagttattacgggacctgtggcaatggatgtcagagtattcagaccaatgacgaaagaaatttctaaatccaagacaaaaagagaaaatgcggaaaagggtctcctgcgtcccgtaacaaagccggacgttgacaactatgtaaagggagttaaagacgccctgaatcatctgatttaccgggatgatagccaggtagtcgatctgaaagttagcaagttttacagtgaagaacccagagtggaagtcattataactgagattgtgtcatgacaggtagcttttgtagagatcctaaatcaaataatcaggaggtcaacaacatgcaagaaaaaattgatccatacaagtctggtccagttaaggagtggaaaatgacgccggagcagttggcggcatacgtcgaaaagcatccaatcatctaccgtgaggaattaaagccatctgccggattaacgatgcggctgccgtcgtaaaacgtaaaaaagcaccgaagctgcgcctcagtgcctttgatatgaactggtacttctatcatagcacagggggcggccagagtgaacaagccaacagaaataaaaaatcatgaaacaactattcagcaaagcatcgagccggggaaagtccggatcatcgttttagatggcactgaagggactgctcatttaatggacgccccggaacacggtaaaacaatcattcaaacaataaaaggcggcctggctcgttgtgattacgagatcggccataaattcaaatagcgggggtttcccctgcgggggaggaacggcatgaaagagagaattgaacgtctaaaaaaactgacatacattcctcagaaggaaattgcttggcttattgagcaagctgagctgtctgttaagcagcaggcaatcattgaggaaaacaagcgtcagcaggaagtaacggttcatcaattccgacaggcacaaaaggatattcagcatctaagcggagatagaaaacgatacaaacaggcattagaaaagatcgttactaatctgaatttcgcgataacagttgcccaaaacgaattggatggtgctgcagaatgatgccattacaagtagttctccaacggaacgtgaaggccacgaaggacgaagcaatgaccgtcgagcaggcggcagagcttttaaaagttcacccggactacatcccgacacttgtcgctcggtctgacgatctgaaaatgattggcgataccattatcgctaaacgagataaaacaaatatctggctggttggagcatgcgtggggcttttcttcttcgctgtctctgtgctgccgaatttgatcgggggttaagggatggcacgctcaccgttaatcgacgatacgccgaacacaacataaataaaatgcccgcccacaaggtgtaaagtgaaaactatatattaaatagggggattcaatggcgctgagaataatttttatgctgatggggttaggattctggttttatttccagtacgaatataggccggacatgaaagcgaacatcacattaataggcgcaatcattgcattcacggccgcggcgttttttcaagatattgataagtatataaaggaacgggaagataaataaatccgatataaattgatttccctaaaagaactaaatgaaatccataatttgccgattctaaaaagagactattagaagaggaggaaatgttatggatgttgttggtttgtttaagagtattgggataccaggttatatagctgctgcaggtatcttagtttacgggttagttgtaacatttaggccaataactactttaactgccaatatatttgaaaagaagcttttttctaaagagaaattgtttactataatgatttggcggcacttttggcagacagtattttggacagtggtttttcttactatattaagtttgagtaatttaccagaatggacagttaatttcaatacatctacgactgttggtacaataactgctacgattggagaaataatattcgcaatcatattgtttatcatagaatttgaggacatggactggggatttacgaattttttcaaaccaaaatggataaggtttagcgttgttattgtttttgtaacatgtttaatattgttctatgttgcgcttgatggttgtataatcggaagtatcaaaggcgagaaccagttaattaaactaatttatattctgggtattccttttattttttctttaccagttccatttttaatgaggcctgtttccagattagtcgaatggtcaaaagataaatatattgttatagatagatccgaacaagaacgtcaacaaaatccttcaacaaatgaagagagtgatgactgttggtatattttacatgctgtcagcaaggaacttattttgttaggaaataaaccaaatcctaaattatgcacggaaacaaaaataataaaattagacgaactatgtgataaaaaaatgtttataaaagacaaaacttgatatagtccaagacggaaagcctgcggacactgatcattgcacagaatcactgtgctttgattggtgtccgttttttatttgaacggagggattacatgaagcaggaaaagaaaaagcccaataaaaacacgcaggagcgctcagatcgtttctggcaacaaatgatgaacacaaacatgcaaacactcagacgcggcaagggcggcgcatttaagcgcaaataagggaggaatcagaatgcaggatttaatcattgaatacaaacgagcattaagagaaacaagaaaaatgtaccggctctacaaagatacggctgaagtcaatctgacggctgaacagatcaacgacaaaaagattatcagtagcatgattagtgacattgaatacgcactcgaatggctgcaaaacggaagacaacctggcgcttgtcgtggtgctgacagaagagacgcatatcaaaggacgattcttgctgatccgcggttgattgatgcgttgccggaagaatacgcaatcgttcaggaagctgagggagaggtaagcgattgggataaggaaaggatcgctgacgccctttccgtgcttacagaaagagaaaaggacatattcatgatgcatactgtgcaaaacatgtcattcgaagagatcgcacagttattagggattaaaaaaggaactgtgcagaagaacatcgaacgttcccgtctgaaaatgaaaaatagagcagatcacagcctattctgtttagcgtgaataggctcttttttattggagaaataatgaaaaaagcccattaaattacttgacgtaagtaaagtttagaggtataattaaagtatagaaaggagggaaagaaagtggctgaaatcgcattggtactggggattatcctcacaactctcacagttgttgaaaaagtcctcatcatcagggaaaagcttaaaacaaaaaagcccaaaatcaaaaaacgccgtcgaccaagaaagcgcagatgattttgagccgagggagaaggtagcgcttctcccttgctccaagtatagcaaatgcggagactaaagaaaaatacttgaaagtcagccactttcaaaaaaatgaaaagtgtacagtccaccaccgatattgttgttcttctcgccttggcgtatatgctgtttttccgtcaggatgtggcagcgggaccattaaaaacggttctcgacattagtctgatcattttatttgttgtttcgatcattgagaaagcattttccctttacttgaaatatcgtgagaaaaaaggatgattcaaaaatgtacaagccgaaagagcgtgacgcaatcaagaaattcttgaatgaagagatactcaatacaagtgaagcgcttgagattttggggttcacccgtcagtatctgaaccagttagtaaagaccggggaattagagccgatgaaagaaatgccccgggacaggctttttctgaaagaggatattttggattttcaaaaacatagaaggaaatgagcaaatatgaaaaaattaatcgatggttcaacgatcttattctttattctgtttgtgatattgttcactaattttaattatggtgatctcagcactctcgatattattactatgattttggcaatgatctggttggtattgaccataattaatataaccctaaaatggagaaacctccgaaatggctaagtttatttttgagagtatagacgagctgagagattttatggataaagaagtcataacgacatctgaagccattgagataatcggatgcagccggcagaacctcaagcagctggtggattatagaacattggttccgattaaaactacgaacagagatcgcctattcttgagaaaagatattgaaggctataaaaagaaacgttgattgcaccctgtcaaaagggtgtttttttgtcttacggttgccacctatttatgaaggatgctttcgttcgacaaattttgcaaatagttcctttatcatactccttaaccgataataatgtgggaggtgatactagatgagggcctttagagtaagattcaattttgtttcaggaaaagatctaaatgttgctttatcagcagaaagtaaagaagaattggtacagcagatttacgaaggtgaggaattcgcttatacagtggataatcaacactttattattgacatgaaacatgtggagtctgttgtattttccgaaacaaaagatcaagaagttatagaagaattaatgagcaaaaactaaagcatcctacggggtgcttttttatgttctctgtaaactgattccggtaaatctcagaaaaacaattggcggttaacggtctgagtacggcgtcggtttagagggaatatcttttccaaaacaaacacgaatcagaagggggcggcggtgaatgtagatggctgaaaagcacattcaggcgtataaggattacgtcaaaggcatgaaatacaaggaccttgccgagaagtacggggtgtcggtgaacaccattaaatcgtggaagcagcggcatggttgggaaaggaaaaagggtgcacccattgaaaaaagtgtgcacacaaaaataggagggcaacccggcaacaaaaacgcattaggaaatagcggcggggcggctccggcaagaaatcaaaacgctgtatcacatgggttcttttcaaagtatctgccggaagaaacgcttgaaatcatggaagagattcaggaacgttcccctgctgatatgatatgggatcagattcaaatacaatacgcggctattctacgggcgcaacgcattatgtttgtgcaggataaagatgatacggcaaaagagctgaaaaaggcaaaatacgtttatcatcaagatgaggatgaagatggcaatctaacatatgaaaaaaacattgtagaagaagaacttgaaatacagttcgcttgggaccgtcatgcgactctcttaaacgctcaatctcgggcaatgagtgagctccggagtctgatcaagcagttcgaccagctggcgcatgagcaagatgagcggcgccttaaattggaacaaatgcgcttgaatatcgagaagacgaagaaggctgttaacggcggcgacggaaacacccaagaaaatgatattgccgcaatgttgaggaaaatggtgaatgccgatggaactgaataaaaagcaaaaggaagtgtgggacagcttcataaaggagcaacccaaaattctaatttgtagcggcgcaaagagggcaggaaaaacattcgtgctccttttgacgttccttgctcacgtcagcaagtatcaaaacatgggtctatcctttatcatcggcggggctactcaggcagccataaaacgaaatgtcttgaacgatatggaattgattctgggtaaagaattgaggcttgacaagtcgaatgccgttgagatatttggcaaccgtgtttattgctttgacggggccaatgctgattcatggaaaaaagcgcgggggttcacgtcagccggcgcattcctaaacgaagcgaccgccctgcacgattcattcgtgaaagaagtcatttcccggtgctcgtataaaggcgctgtggtcatgatggatacaaaccccgaaaacccgatgcacaccgtcaaaacggattatatcgacaaagacgggcaggtattgaaaagcggccgactgaacatccggtcatttcatttctcgctgttcgataacaattttctcgatccggaatatgtggagagcatcgtggcatcgacgccgagcggcatgtttacagatcgggacatacacggttattgggtggcgcctgaaggagtcatatacaaggatttcaataaggatatacactatatcagctctgaggaattggaaaacaggcgcgtcaatttcaagaagtattttgcgggcgtcgattggggatatgagcacccgggttctattgttgtaatcggacaagatgaccaggggtgtttttatttgctcgaagaatatgccaagcaacatgaggaaattgactactgggtgaaggtagcgaaggacatcaaagagcgatacggcaacatcaatttctactgcgatactgcgcgaccggaacacgttcagcgattccgaagggagaaactgcgtgcattgaacgctgataaggcggtcatatccggtatcgaggaagtggcgcggctgtttaagcgacatgaattgttcatcgtgaaagataaggtcgctcgcttcgaaaaggaaatttttatgtatgtttggaatcaaaagactggcgatcctgtgaaggaatgggacgacgtgctggactcactccggtacgctctgtattcgcataataaaccgaaaaggcggaaaggggtgagctgatgaatcagtttatagaaatcattgagaagtccggtataacacctgaattgattgacaagatcattcaggagcataagccggatcatgacagaatgaaaaagctttatgatcggtaccaggctgaggttcaaggcgttccgatcttatccagagaagccattgaatacgaggattttgaaacaggaaaattaaaacgtattgatcacaaggtaaacaataggctgaacaactcgtttgactctgaaatcattgatacaaaggtgggctatttgtttggtcatcctattgcatatgagtttgatgagagcggtgaagcaagtaatgcaaaacttgtgaaacagctgattgaaggtttcaatgcggaaaacaacattgctgatgaagacagcgagtgggggaaaatggcctctatttgcggttacggcgcccgcctcgcttacgttgatcgttctggaaacgagcgaataaaaaatattgatccatgggaatgtgcttttattactgatggaagcattcatgaacctacttacgctttgcgatattacacggtgtatggcggcaagattaaagcagaattctatgatcagaaatatgtttattatttcagtacgaaagacagctcggccttcactcttgataaaaaaactttgcatctttttggcggctgccccttattcggtttagcgaataacaaggaactaaagggagatgccgaaaaggtcctttcgttaattgatgcgtatgaccgcacgttgtccgatgcatcgaatgagattgagcaataccgactggcttatctgattttaaaagggcttggcgcggatgaagagacgcttgatcagctaaaaaagaccggaatccttgagttgcttgacgaaaaagatgacgtaagctatctgacaaaggatataaacgatgccatcatagaaaaccatcttgataggttggaagagaatatccttcgctttgcaaaatcggtcaatttctccgatgaatcatttggcgggaatgtttcaggggttgcgatgaaatataaattgatgtcgcttgaaaacaaatgcatcacaatggaacggaagatgactgctgctctgcgttatcaatataaactgattttttccgcatggggcactaaaaggcaagcggcggcggaagattataaaaaagtttggtttggatttaagcgaaatcttccggcaaatgtactagaagaagcaaacacgacgggacagcttaaaggaatggtaagcgaagaaacccgcctgtctctgctgtcgtttgttgatgatgtccagtatgagctgaagaagatggaagaggaagaagaggaatacaggctcaacatgccgccgttaacggatgtggaaacagacgcgggcggtgatgaagatgaaccagaatgatattgataagtacctggacgacatgatcactgaggatgctcagaagattgatgtcgtttttgcatctcgcttaaaggagatcaatgcacaaattgcccggctgtatgcgaagtacagcaaggacggccagcttacttttgccgatgccaacaaatacaatcgtctgaataaggaaatggagagggtggccgaggaatctcacaaggctttcaaaaccattttgactattgttgaggcattagcagccaagcagtttttagagaattatatgcgttctgcttatctatttgaaatggaatccgtggttaacttgggttttagcatcccgacagccgaagtcatccggcaggccattctaaaccccatagctgaattgactttgtcagcgatatacaggcggcatcgagacgattatgtccggcagattcaaatttccgtcgcacagggcctacaagcgggggaggattattcaaagatcgcccgccgcattgaaagagcgacggaatttgcccgcaggaaagcccgtgacgtggcgagaacagaagctcatagggtacaagtctcggcaaggatggaaagcgctgagaaggcctcaaaacggagcaatctaaaaaagatgtggaatgctaccctggatcttaaaacacgagccggtcacaggaagctggacgggaagacaatagaacgcaatgggctgttcaaatcaatttacggcggcgtcggcccggctccggggcacatgaataatgcgaaagatgacataaactgccgttgtacgattgcttttaaagtaaacggcgtcctgccggatacgagaagggcgagggaaggcggcagcggggcaggtcaatcaatcccataccaaacctatgaagagtggtacaaatccattgaggaaaagggcagccgttaaacagcggctttttattttgtcctgagcatgacgttaaaaggcttatttttcatgcactcataacaggcgcgcactgtagagggcaaaggaggaagaagcgtaatgccaacattagaagatgtgaaaaaatttcttgaagaaaataaagagaacgaggaagtacagtcgtatctgaatgaactttctgccgtgtctgctgacaaggtgaatgggtttttagatacagaagaaggaaaacgtctcattcagcctcggttggattctcattttacaaaaggccttgatacgtggaaggcgaacaatctcgatgctctggttgatgcaaaggtaaaagagctttatccggaagaaacagaagagcagaagcggatcaggaagctggaaaaggagctgaaagatcaaaagacagcagcacaacgtgaaaagcttttaaacaaagctgtttcttatgcttccgaaaagcaactgccggcagatgtagatgtagtgggattctttgtcggtgaggatgaagaatcaacgatgaagaacctcggagcattcgaagagaagtacaacgctgcacttcaaaaggctattgaatccaagtttcaagagaatggccgtgatgtccagtccggcagcaatgaaccgacaaatcaagatttagacatcagctcgcttgcggctgaagcaagtattagaaaataaggagggctatctttaatggcaacatttaatccaaacaatgcattaatgcaagactcagtaaatgggaaggttccaactgaacaaggaacgctggttttaaaagaatttatgactcaatctgctgtcacgaaactagcaaaatatgaagaaatgagtaagccggtgaaggaattcacgtacttggcttctggaccgggagcttactgggttggagaaggcgagagaatccaaacttctaaggctcaatggttaacagcaaaaatgatttcaaagaaattgggtgtcatcatccctgtttctaaagaattcttgcgctactctgtaacagatttcttcacacaaatgcgccctgctatcgctgaagcctttgcgatcaaatttgatcaggctgcgttattcggtgtagattcaccgtttggaaaaggtgtatctgtatttgaaaaaatcaaggaatctggtaacacaattgcgttaaactcacttggcaatctatatgatgagttaaacggggtcatggctcttgttgaagacgctgacaaagatgtaaacggctttacaacaacacgccgattccgtcaaaagctccgcggcacaaaggatggtaatggtcttccgatcttcaacgatgcgacaggcggcgccacacagcaggctcttggccttccgattggatatgcggattctaagtcatgggattacgaaaaagcggcattacttgcggctgactggaattacacacgttatggaatccctcaaggaatggaatacaaaatctcagaggatgcaacattgacaacgattgttgatgcagacggaaacccgatcaacttgtatgagagagatatggttgctcttcgtgtgactcagcaagtcggattcatgacattgactgacgatgcgtttgcggccattacaccagcaacggaggcgtaagcttatgggatatacatctaaaaactataacactaataacggcgacaaattggtgatcggcggcgagcttgaaataaaagagggggcgaaggtgaccgggttatcgggttctgcgcctgctcctaaaactatcacttcggaaatgatcggcgacggagaagtgaaaaacatcaatatcggtgatgggtccgtccaaaaccgtaatatcggcaccgggagcgttcaaacaaaaaatgtgggagataaggcagttactttagctaaactcggtgacgatgtgacagccaaactatctgatttagagaatcggataaaagcactggaaggaggcagcgcgtgatatgaaagcatctaacggttccaaaaccattgaatgcactgaaaaggcttttgaggtggtttattctcacattggttttaagagagtggaagaggccaagaagccagctgccgatcttcttgatatgactgaggctcaactgcagaaggtaaacaaagatgagattattgctttcttgaaagagaatgaatatgattttgaccctaaagcgcctaaagacgaactgatcaagattgtcttaggtgaagagtaggtgattcagtggacatcgtacaagtaaagcgaatgacagagattaagacagataggcatgacgaatatttgtctgaaatagtccctattttgattgagtctgccagtgatttttgtagcaacactttcgatccggaggctttaccagctggcgtgaagctttttgttgcgaaggctgcggaatataacatgaatccttctggactctcgggaagaagcatgggggatgtgtcctattcgtacaatacagaatttcctcggtacatcacaaagcaccttacgccatatcgaaggctgagagttaaatgatctatgaggaattcccgcacgtcataacgtttcagcggtgggaagaggtgccggacggcggcgggggctatgttgaaaaattcactgattatctcacaacagaggcctttgtcggcgggattacgtcccgggaatattatcaggctcagcagcttcaaaacccggttgattgcaatgtgtatttcccgtatcgcaatgatattgagaagacaatgcggatcatctatgaaaacaaggtgctgactctcaaatcagatccgatcgaccagggaggcatgcatgagattatgaatttgaaatgtcaggtaacgggggtgctgaagggcaatggctgaggtcagtggtagatgggtcaggcagatgcaaagagccacgagcgagttcagaaaccgggtcatagacgatattaagcaactggtcacagacacggccgagctgatttacagccatgctgttctgaatgctccgaccgccgcaatagacggggggaacctgaaaaattcaattgaaatcgactaccaagagggcggcttacgggccgttatttctgttggtgccgattatgccgtatatgtggaatacggaacagggatttacgcagaggaaggcggcggccggcaaacgccgtgggtttattatgacaccaagcttaatagatgggtggtcacccggggaatgcgggcgcaaccgttctggaatccagcggtggacgaaggcatgcggtattttgccagtcaaatgtgatagaaaggagctgtcatcatgcgatctgccctgtggctgttgcaggctgctctatttaagaggttatcaacagacgaagagctgaacgggcgcgtcacgggcgtctttgatgcagtcccgaaagatcagcaaaagccttatgtaacaatgggggatgatgatgtttccccatttaaaaccaagacatccaacggtgaagaaattaatgtcgttctgcactgctggtcaggttacaacggaaaaaaagaagcgatggagattttgagcctcatgcttcaagcgttaacaagcaggcccctaacaatagagggcttttctttatgccgttctgagatgcgcagcatgcaggtgatcaccgatattgacgggtatacgcgtcacggcattctcagaatgcgcttcacaataaacaattgagaggatgaaagaaatgccagatttattaaacggtaaagatgagattttctttgtgcagccaatggatgcaaaagatggcgaaggtctatttattgcctttcagacggaaggatcacacacgaaagaacaagatacactagacgagtccacaaaatcaggccggatcgttggatatggtacgaaaaacgaaagctttgaattgacttattttgctgccgttaccgatccaggacaagaagcgattgaaaaagcatttgacgacgaaaaagcaattaaagtctggaaggcgaatatcaacaaaaatgcagagggcaaacaccctgccgtttatgggcatgcgatcatcgaaagtttagaatcaggctctccacaggatggctttgtcgaagtatcagtcaccttaccggtattaggaaaaacctttaagggagaattgcccgctatccctgatgatgtgctgaaaacaattaaatcatcggccggcgctaaaggatttgaagatttcggcactaaaagcactacgccctaatgcgccccaaaatctatcgttcacggctacggctgacagcgtgaccgtgaaatgggatgcggtagatggggcaacttcatataaggtatacaggggagcgagcaagcagctggacgcaactgtcactggcacatcccacaccttgacaggaattgcagccgacacgaaactgacggtcaacgtctctgctgtgaacgatgcgggcgagtcctcaatgactgagattgttacacaaacacaagcggttacgccctaacgtcccccgcaatataactgcgaaaagcgccacttcaaatcaggtgagtttttcatgggatgcggtgaaaggggcgacatcttacaacatttacaggttttatgcaaaaatagcgactgtctcaaagaattcgtacacgtcgaatcctaacctgaagccggacaccgcctacatttttaacgtgtcggcagtgaactcggccggggaatcggaacgatcgacaaattttacgatacgaacagaaaaggaatcatagggtccggacttcccgggctcttttttaacataaaaaaataatcggaggttttataaatggcttacttaactatcggagataaagaatacaaatcacgttgcgactttgcttttgacagattggcaaacgaaaaatattccaccgaggacgaaaagggcaaaggcggcacaatgaatatttacatgagcctacttaacgaagaggcttcctacctttctgctttttgggattgcgcactcgcttacttgaagaaagaaaagccatcaactgaggctattgaagaagcaatcatgaaaatcattgatgaagacgagacaggcgaggcaattgacaagatgatcaatgaagcattcacaacactggactcagcgggttttttcaaaggtgtgatccgtcaacgctggaagatgatggagaagatgaacaaagggaagaaaccggctccgaacgaaacaccggaaatggaagcgaaacggctggaggacgaagagaacggcaaggaagtcctgaagatgatgaaagaggcgtacaaagagagaacgggatcgactacgaccaaataattacgaattccgcacgttggctcaaggtttatgatgtggatttaatcatgtcatggactcctaacgagtacaagcttctgctcaaaggggccaagttgcgagaaatagatgaattggagcttatggcaagaaacgccatgtttcaccgttacgccatgaatgagaagcgccccaaagaaacgaaaatgtttgatgcgaagaaggccagacgccaattggagcgcaatatcactggcgataacgacaaatggcgtaagacagatgtaaacgagctcggcaagcgagccaaaggggttcagcggtttaatgatgcaatccgcaaccactttgcaaaatccggacaaggaatggggtgagggaatgatcgaaagactgacagcaatagttgaagcgcagacacgaagatttactcgcagcatggatcgtgtgaatgatatgatgcgccggatgaatgatcatcagacggtggaaattgacgcagagatcgcaagctttcaggccagagtgcggcaggccgagcagcaaattgataattttgtacatcgacatgaacgcacgcgagttgatttagatgctgattcagatcctctgactagagctgtgtcagaagcacggacagctttagcttcgttgcgaaatagagtcactaccaacataaacggtgatacctcgaatttaacgagagcggtagcagtagccagaacagagacacattccttgccaaaacgtgtttggatacacatcgaagcccgaattgatcggtttgaaacatcaatgaacaggctcgccaaaatcactaactctgtttcaactgtcataggtcattcgcttgctggcgccttcacgtccgcattgcctgcaatttctccggttcttgccagcataaccggggcaattggtgccttgggccctatgctcggggtggcagctggcggggttatggggttaaccagtgcatttgcaacagcgggaacaggcgcggcggcattcggtgccctggctattacttcaataagcggtgtattcaaagcatctgaagaccttgcaaagctgcaggagaagctggacaatgcaacgagcgcaaaagagcgcgctaaaatcatgaaacagatcaataatctgcaaaaatctcttggaaaagaagagagagaggcattaaagaacctcgaagacttcaaagacaattggcgggacatcggtacgatggttcaaaagccgatcttaaaaacattcggtatgtctctaaatacgtttaaactcgctcttaactcactcattccaatgtttgatggactggcaaaagagggcgtgggactggcaaaaagcatggacaaagcttttaaagctccggacatgcagagattcatttcttatctgaacaaagaagctccgggggcatttgcttcattcggcagatcggccggaaatgtcttacggacagtttttaatctgatcgtagcattcgggccggccggaaagagcatgacgaaatccatcgaaggaataacccaatcatgggtgaaatggtcagcgaacttgggttcttcaaagaaatttaaggctttcgtggagtatacaaaaacaaacggcccaaaactgctacagatcatcagaaacttttcgggcggtctgacaaagctgtttaccgggttcgctcctatgtctcaagacatgatgacgtcactcgtagatctgaccaagcggttcaatgagtgggctggtagcgttacgaaaacaaaagaatttcaatcgttcattgactatatcaaaaccaacggccctacagtatggagcacattggggcagatcgcgaagactatcatcaacttgcttgtcggcatggctccactcggaaaaacgattttggagaatgtaaacgggtttttgaaatttactaatgcggcgatggaagcaaacccggcaatcgggaagttcattgcgacgggcatttcattaatcggtgctttaagagctattgttccggcgatagtagcagtcagtgctgtaacaaatggctttaaagattttgcggaagccgcaggttacctacggaatttcaaaaatacagcggcaggtattaaacttgctggcatgattggccaattaaaatcatcgatagcaactatgggacaattcattgcgaagtatacagcgatggcagcaagtgcaacagctaatgctgtgaaaatggcggcatcgtggacagccatgaaaatatcagcgtttgtttctgctctgaggcgcggcattgttcaaatgggcttatggatcaagaatatgactgtaatggcggcccaatcaatcgcaagtgctgcccgtacagcaaccgcatggacagcaatgaagatctcctcttttatcacaatgctgacaaacgggattaagcagatgggtcttttcattgccaaaatgaccgtgctcgcagcgcaatccatagcacaggcaacccgcatggcagcggcttggacggcggcgcagatcagcaatttcatatctttgctggttgcaggcggtaagcaaatggttttattcggtcggcaactcgtcgtgcttgcggcacaagcggcagcacaggcggcacgtatggccgcatcatgggtcatcgcaatggggcctatcggatggattacggcggctgtcatcggtctggttgccttgatcatcgcgaattgggacacggtaaaatcggctacaattgcggcatggggcgctatttccagttggctgtctactgtctggacaggtataaagacgatagcaacatcaacatggaacggaataaagtcgttcttctctactgtttggaatggaattgtatcggcagctaaaagcatttggaacggcctgaaaacattcttttcatcactctggaatgggatgaaaaccgcgttcacaacggtttggaacggcattaagtcattcgccacttcaacctggaaaggcattgtgtcagtcgggaaatctgtctggaatggtttaaaaacgttcttttcatctgtttggaatggaatgaaaaccgcatttacaagcatttggaacggcatcaaaacaattgctacttcgatctggaagggcgttgtatcagttggaaaatcaatctggaatggattgaaaacattcttcaccagttggctaaatacgcaaaagaaaatcttcagcaccgtttggaatgcgataaaaactgttgttaccacagtatggaaagctgtatcgtctactgccaagagcatttggaatgggttgaagtcattttttagtagcatgctgaatggcaccaagagtgtttttacaagcgtgtggaacgctgtcaaaggttttgtgacagggctctggaaagggcttgtgagtacagctaaaagcctattcaatagtatgaaaaacgctatttccggcataatgaaatcagcaaaatcaacaattacaagcatatggaacggtgtcatgaagtttttccgcggcattaacttgtggcagatcggtaagaacatcatccaaggcttaataaatggtatcagcggcatggcgggagcattagcgagcaaagtaaaatcaatggcaaatgctattcccaacggcatgaaaaaacttctgggaatccattctccgtcaagggtaatgcgtgacaaggtcggctatcacgtcggcaccggtatggcagctggtattgataaatcgcagggcaaagtaaaagcggccgcggcaaaagcagcgaaaacggctcagaaggcggctgaggtaaaggtatctaataaaattaagaacgctgaagtgaagtatgacaccaagaaaatgggcgccgatacgtatatcaaaacattgcagaagattcagaagcaaaacaagcttaccagcgagcaaaaccgaaaaatacagcgcgagatatatcaggcatccaaaagcgcctctgttaaacagaagaagcttttgaaagagcagcagcgcaaggaagcgaaggcgaagctggcgtataccaagaaagtatcagatcagattaagaaagctgaggcaaaatacgatacaggaaaaatcagcgggaatacctatatcaaaacgcttgagaaaatcaagaagaagaacaagttgaattctgaccagcaaataaaggttcaacgggaaatctatcagactcaaaaagcgatggctgataaggccagaaagcagaaggaagtcgaaaagaaagcggctgacaaacttaacaagggcattctttctgcaaacaatacttatctctcaaaattcaaaagtgtgaatgataaactgactgccgatattaaggcggccaatgatgcctataaaaaagagctgcaagaccgaactgacgcgatctataacgccatcggtctatttgacgatgtctcaagtcaaaatgtgaacggctccaagctgacttcaaatcttaaaaagcagctggacaagatcaaaacgttcaacactgacattacaaaaataacaagccgggcaccgaaggcattcacagacgaattgaaagaaatgggtgtcgggtcagctgatcagattaatgcaatagcccgtatgacagattcagagctaaatgagtatgtcagtctgtggaaagaaaagcacaagctcgccagtgaccaagctgcccaagaattaaccggcttgaagaacgcgacgaccaagaaaataaatgaattacgatcggccgcaaataaagaactggcacttttgaaaaatgactatctccgcaaaattggggagcttacagtggatgtaaaacagcttggttctctcaagaaaagcggaaaagccatcggttcaaatacaatggctggcattatttctggaatgaagaatatgaagggcgagctggcgaaagaagcaaattccatcgcctcgacaattgagaaaaccattaagaaaaaattgaaaatccactccccatccagattgatgcgggatcaggtcgggatcatggttcctgccggtatcgctgtggggattcagaatggtatcggcactgttcagaaagctatgggcgccgtcagtgatgccatgactattcagcaggaggatctgaattttgcatatgacacatccatttctagcagagaactcggcacggttagaaaagaattgagcgcggacatccggaaccttgaattgcctgacagaatgattgttgttgagatggacagcaagaaggtcggtcaaggcgtagaaaaacctgtcacagacgctcagaaaaggtcgaacgcaaggaggacgagatttaattgatcaattatcaggaactactgcctaaccaatggaaaatcatgtttgacggcattgatatatcacccttcttttatgtgaagaccacgggcggccggggagtgacaggaagagaagtgaatacagccactatcgggaatcgtccgggaggtttcctgcgggacacaagaattcctgtaagagtcataaccgttgaggttctttttgccttccgtagtgaagaagagctgaagaaaaagcaggaggaactgacttttattctgcacactgaagagcctaagccgttaatttttcacgatgagcctgacagagtctataatgctgtctttgaaagcatttcagaaggcgaagaacagggaggctttcaaactgcaacattgacttttatctgccccgatccaaaaaaatacggcccggcgaaggattttgaatttaattcaggtgttcaaactattactaatcctggctatgcagccgtagacccaacaatcgaatgcgtttttgaagagaaagccacttcatatgacgtggctcttcttaatgctgatgggactgtatcgaaaacgatcaagctgctgtacgatttcatcgctggtgacacacttgtaattgattcagcaaaaagaaaggtcacttgcagcggtaatttaatcatgacagcacttcaaattcaatcagattggtttctgttgccgcccaggacgccagttaaaatcaagttcagtcataagagcagtatcaaatttaatgaggcatatttgtaaggaggtccggtcatggctgacatttatatactttcaccagatgataaattattgacagtgctgtccagccacggacgagaaacctgtacgttctgggatgcaaaatacaaggaagagctcaacaagggctcttctttttcttttgtagcggacgcctcccatccggacgcacgcttcctatttgaagagaatcaagtggtgttcagggataaggatggtgtactgcgtctgtttgttattaaggaattggatgatgcagacgaagaaggagaggttaatacccaggttacctgtgaggctgccataatggagcttgcggaaacctttgtaaaagatttccgacctaccaataaaactgcacagtttgtactggacaacgttctttctcggtcaagatgggtggcggaagtaacggcggagcttggagtgaatacgactaccttctataaaaaaacagcattggattgtatcgctgatgtgatcaatatatggggcggagagcttcaggacactatagaatttgatggtaataaggtcgtcaaacgaatcataaaaatacttccccgtcgcggtaaagacagcggaaagcgctttgagagtgataaggatacaacgagtatccggcggaccgttatcagttacccggtgacagccctttggggttacggggcatccatagcatctacggatgaggaaggagaggaaacgggcggctattcccgttttattgatttctctgaagtagaatggaaaaaatcaaaaggcgacccggtcgataagcctttaggccaggaatgggttggcgatccggatttattagaaagattggggcgccttaaagatggaaagttgatccatcgggaaggccagttcaataatgaagacataacggagccggaagagctcttaaaggccacgtataatcatttgataacgactgcatgtaagacagaaatcaattatgagctgtctgtgcagctgcttgagagcgtgccgggacacgaacacgaacatgtggaattgggagatacaacgatcgcgattgatcgaaacttcgctattccaatcgagacatcgcagcgcgttatttcaatggaatacgatattactgaccctgaaaatacttgcgtcgttgagatcggccaatttttatcggcattacaaaaagacggtaggcttgagcagattgaaagtgtgatcgaaaagaaccgtggcacttgggaaagcaaaccggacgccggagaggttacggacggcagctttcccgacaaagcaccgcccgttccgtcgaatgtagtgatcaaacccatgtttcagaatgtggccctgacatgggactatgatccgtccagttatattgcagcctacgaggtgtatgcttcacaagtaaatggattcaccccattaaaagagaatcgtattttcagaggcaaaacaggcggatacgagcattttacgggagtaaatgaagtttggtattatcgcttgcgctcaatcaacacacggggcgcagcaagcgaattcacggatcagttctccgcgaccactcagcgcattcggactgatgacattgttttcggagcgatcacaaaagaaaaactggcccaactggccgtcgatgctgataaactttccagaaactttgatgatgctaatatcttacccggctctcttttaaaatctaaatggttctatgattatacggacaccagccacagtgttgaggaaaaagaatttaatgaaatgactgtttctcaaattatcaatggaacaactagaatagctttcggaatatgcgggaacaggtcctcgcctgttaatattcaaagaatggcattggtcaaagatcaacaatatacactgtcatttgaaataaaacggaataataccaccgacataagttatatccatttgaaaaaaggcagcactttcatacaaattagcagcgatgaacagaaagatatttctgcttttccatctgaccaatttataagagttaatatcaaatttactgctccggaaaccggctctgattacacaattggaattggcggatataaccgaaacggaaacacggagccttgtagctttgttatccgtaaggtacaggtgcgcaaaggcgatgtcatttctgattatggttatagcccgtttgatactcagctggttgatggtgttattgatggcgaccacctccaaaaggcggtaatagaaacagctcatataaaaaatgcagccataacaagtgcgaaagttgctgaagcggctatcgggacagcggctattcaaaatgcggctatcgcaaaggcgcatctaaaagaagcaataattgattcggtacacatcattgacggttcaataacaaacgccaagatccaagacctttcagcggacaaaataaacgtcgggacgttaaaaggtatcacaatagagggtgtggacataaaaggggcccgtttcgaggcgctgacacaatcagaagatgccgaatactatatcgaaggtgataagatttaccaattcaccagagactctcattatgattacaacaaattggttgttagttctgcgaaaataacgcaggaacaaggaaggttttacgatcctggtaattcctataatgaaatctacagaacagtctcaattggtgatggcaaaattgagctccgtggcgcaggcgagcaaaccgcatatgaaacggttccaactatttcaatgtattcagaaataggagatgttggacaagttataagccattttaatatgaaaatggaaagacaggcagctgttgaagaagacgcttttcttcttactgctactaccaatcctaaaaatataggagagccgttcacatataaccgttatcaggccctttttgaaggatcagctactatttatcgctttaaaccgaataatttagatattgatgtccccggggtcattcgactgaaatcaggccaaaaaacgattgttgatgcatcagatttaacgctaccactgggaaccaaagttgtagcagggaatgcaaaaaattgcgaattcaaattgatgggtggcaatgtttctacagaattagaagacgagcatggaggcctacaatacggtttgatggtttactgctttacttgggacattaaactgccgcctgacggaggggcaactgcgtacgcgcgctacaatcgcattccttttgttgatagtttttattatgcgcctgagaacgtttttgcggcggtaggtacagccattggcgcatattctaatgcggttacggtgggattagaaaatataagcgccagttctgttgatattggagtgagagggactgggactactgccggagttgcgggaaaaacgataaaggttcaaattgttattttttacgaatcacaataaaggagtaatttttatgattgaaaaaagggattttaacatgagtctttattatgcggacggcatcgaaatagaagaaaccagcgcgggaatcgaaataactgccggctctataaaaaaaggagtcaagacatatcccatggaggctgtttcgttcgatctgcagccggacgatacaacaaaagtagcgtatcaattatatgtccttcatgatataaagtctgatgaaataagctatttgctcacaaaaacttatgtagagcctgacggttattatcaagggtacagtgggagcaaaaagcttattatgattccagttcaaattgtcgttgatccacaaggcaaccgagaagggcttataacaatctacgttcaaaataaggaggatggcaaagatgaagcttgagcccgtggtattaaatattgaagcaaaagatagagaaaaggaaaagactacagaggaaaagttgcaggagcaagtccttgaccttcagcgggtttgcaatctcttaatgaatcaataaaaggaaacggggggagcccattggagaaccgaagtgctcttttcgggttttttgaggattgctggaaaaacggaactgttttgaccgttgaaatgagaaaagccgttgagaaaggccgcatcacacaagcggaatatgatgaaattacagaaagcgaacgcggtaatgcgtatcccgatcaagagtaaggagtgaaaggcatgcaagaaatgacaaaagagcaacttcaggaccagttacaaattgcagcatataaagctgcttccctacagcaggaattgaatctgaagaataatgagctggccgaatataaagcgctatacacgtttgcagataataaacgcgaggaactcgaaaagcaattaaatgcgacagtagcggcgaaagaaaataatagtgaaccagcacctgtaactgaataggtgtttttattttgcctcgaaggaggtgaagcgtatgagatagaaaaaggggggcgtactaatgtcacaaatgacggaggtaccggaagtgaatgctttacaaaaagaaataacagaggttaaagccgggcaaaagactcttgaacagcgagtgagtgtccttgagcgttcttcagacaggcatgatcagcaaatcatttcattaaacgaaaagctgaacaaaattgatgaaaatacgacttggatcaaacggaccatcacaggagccataataacggcagtcagcaccggttttatcgggggggctatcgcgatcatgtataacctgctgcaaaaataaggaggaaaataacatatgaaaaaattcgacaaaggtacagtcgtccggactgtgcttctttttattgctctcgtaaaccaagttttagtgatgtttggtaaggatgtgctaccgattgcagatgatcaagtgaatgaccttgcggacgcggtttatttaggcggctccatcggttttacgatcatcatgtcactggtagcatggttcaaaaacaactatgtgactgaaaaaggccataagcaaaaagccgttttaaaacagcacgatttgaccaagtaagggctgccattcggcggcctttttatatttcaaaacagaataggagagatttttcatgacaattgcagtgaaaaagagattagtttcaagcgaagaatacagcctgaaatgcccgaatccaatgacgccggagtatatcaccatccataacacagcaaacgacgcatcagccgccaatgaaatcagttatatgacgggaaacagagaatcgacaagctatcattttgccgtcgatgataaagaggtcatccaggggattccgctgaaccggaatgcttggcattctggcgacggtacaaatggaaccgggaaccgtaagtctatcggcgtggaaatctgctacagcaagtcaggcggcgcacgataccaggaagcagaggcgctggctatcaagtttgtggcgcagcttctaaaagagcgcggctggggcgtcgacaggatcagaaagcatcaggactggaatggaaaatactgcccgcaccgtattttagatgaggggcgctgggatgaagtgaaatcgtctatcgttgcagaacttgaacgccttggaggtaaaaaagcatccaaaccacaaaaaacagattcgaagaccagcggggcgacgtacaccgtcaagaaaggcgatgtcctttctgtaattgcagagaaaacaggagtaagcatgaaaaccctgcaaagcttgaacggcatcaagaatccgaatctaatcaaagtcggtcaaatattaaagctgactggctcggccggctcttcatccaacggcaagaaatcatccttccgccttccagcgggtatttttaaaatcacaagcccgttaacccgaggggaggccgtaaaacagattcaaacggcgctggcggctcttcattattacccggacaaaagtgcgaagagtttcggaatagacggcgcatatggcccgaaaacagcgaatgcggtgaaacgattccagtccatgtatggcctgtctgctgacggcatctatgggccgaagacaaaaacaaagatcgaagcgcttctgaaatgaaaatgagcaggcattaggcctgctcattttgttttaagtcatttgttaggtattctatatcttgtatgtaccgttgtatagtttcctcaattgcatctcttacaacccgagggtaacccttttcaccttcctgtttctgctccttcttcagttcttctaaatcctctttaaacaatttaatagcagtctttttttggtcaacattcatatgattgtaaatttttctcatgataagtctccttttttaactaattttaaacaaaaattataaattttagtatataatactatattggaaggaggtggtaaaatgaaaaggattatgtcaagcgtaattattctgtctctcacaggcttacttttagtatcaacactattaccaagcgttgcaagtgccgcaactcctaatagtcaaactgagactaaaggaacaacacagagtgttaatgttcaaactaacactgtgaacaatttggctgaggaacagagtgaggagccagtgttccacactaccggcattaaaggctatctagtcaaattagctgcaaatacagtctccttaggaattagacatggcggagcagcggttggccaaatattaaaacatgccgacgctaaagcagcaaaagcatttaaaaagaattcaggctacatagcagataagatagatgaaatagctgaacttcccgatgttactgcacatatgatttcggacaagctatttaaggctttgaagggtaagattggcggaggatcggccaaaataattgctgatggtgtttattatgctattaatctattgttgttctaaaagcaggtaaatgcctgcttttcctcttggtgaatgtataagctctgaaaaaaatcagaggcagagcgttaagaagtatcgtttgtatgatgaatgattcccttctcgtgacgaggagggttttttgtgatgtacggcctgactgctgatggcatttacgggccgaaaacaaaagtgaagcttgaagctctactaacataagagaatcccttctcgttatgagaagggatttatatttttattcatcgtatagtttattaaccaaatcagtaaatgaatcagatatatgactcaaagctccatcaggatcttcatatgcaatttcatgatcccagaataccaccgtgggattctctttattctgacgataatcgaaacagatttcattaccgaaaggatcacaggcgaaagggactatccctgaaagcattcttccatcctgataatcttctaaaacctctaaaataaaacttgaactatcctcagttagaccatgtaatcgattaaaaaccgcgccttttgtattttcatagtcaaaaatctttttacttgggcgtgctccattgttgtttaatatagttgaaatgtagtcgtttggaaacttaatatctaaagccttttcgatttttttaacagttgtttccccgataggttcttcggcgaatctccactctgtcatattgaccaactcctatctgttcttacttcctccaccccaaaggtgccggcctcctgtatggcctgtttgccgatgcaccttttggtcaactaattgcattctccctgaatcttggtgatgatgccaagtatatccgtctggtgtttcaccagcttttatcatttcgatttgaaggtcattgaattgatttctaagtaaaggatctctttcaatttcttcttttaattttaaggttgcatctttaaattgtaaataatcgctttccttataaagtttggaatcaatctttgtatcaaattttgctttgaaaattgggaaaccgtctttattatatggaactccagttttagggtgtttttggtttttaagatggcccatttttaagttaactgttttgaggtttccatattcatctctgtaagtataaggtgcggctttagtaaacaaatcatcctttgattgaactaatctctttaaaagcggcgtatttttaacattaatagtattcccggcgtcttgtaaaatcccttctaatgccggggtatatctattggcataaggcttgacagatggattgccatttttaatcttttcgctagccgccttcccaactttagcaagatcttttgagcctgttgagacagaggactttccgcctttcaataacagaagacttccgcccaagtaagtaacatagtgcatccgtgtatatgcatccccgtgaatcatctttttatcccaatcatccttcaatgtgtcaaccatactttgatagacacctagataatcgtattccagaacagtatccagaactttttgaggatctttgtttaagttgtcaattgtccaaccgatattccatccgagttgaagtgctccttcaccggtatccttggcaagatcgtatacaccaacaagcagacctttggcgccatcacctatgatttgcaatgcttcttttccgttatccatgaaagctttacgctgttccagaaatgaaacaaattcaagctgttcaggggtgagattctcatagccaacctttttggcgatttctaagtattcatccgggtcggttacgccatcagccagctttttcttcagatccttgatttcacgctctttcgcttcttcctttttaaccgtcaaataagcatccgaatgtcttgcgatatcgccttttttcttatggatgtcgctttctcggtacgccttggcattgtagtgaagcggcgtggcgttttttcctttacctgtggcgttttggagctgctcaaagtcggcttggatgaactgttcgttcgcttcggtttctgcgtattctttcgttagatcgtgatcaagcttgccgagcttatgtatcgtttcgcttctttttttgtcagctgaagagagcttctgatccgtgttttcggttgaaaacagatcaagcgagatgatgtcttcgatctcaccgaggatggagcgcatgtcctttttctgcgcttccataatcgcctttgatttactgagggcgtgggtgagctcatgctccagaaatgattcctccacatgtgaaccggaaagtccggcgtcttcgaccttgccgggaaggcttgtgagaaatgcgattttcatgtcgatcagatcaagccagctgtctgtgacgccggagtggtcttggaaaaaggctttgatgttgtcagcgccccggcctgaaaagtcactgtcaccgaggtcagccataccttgaaatgctttttttagattgaccatctgtccgcgcagttctttgtattcacccgcacgctgcttggcggcggccagcagggtatttgcttcgaaaactttcatgaccatatcctttcatacgaaatactttaacaagatattaccatggaagaatgaagaaaaagatcgctgtacgattcaaaaggggaaaatgaatagtttgacctgagtctttttgcttattcctgagtagttaaacatttaagtaatgagggttatcagctggtagcttgcttggaatcacccggcagcatttaagtacccttgtgacttccggaaagctcaaaccggttaaaaagtttgcttggacattacaaaccctaaaaaagaatcagaagccagccgtatgatgaatgaagcccttctcgagatgagaagggtttgtgtttgtcgtacgtttgccacttaactaaaaaacctttaaaaaatatccaaatttttctttgttttggtgtataattgcattaaaaacaaaaaagaggggtataattgcaatcaattcagaatatatcacttataaaagatatcgtaacattaccgaaggattcattagttgatatttgtaaacaagctggtttgccaactgacggaactataaacgacctatccagtagaatttgggaaaaaataaagggagatagagacgttcaagatgaggcattaagcgttgtaaagtcaagaattctttcgggaaaaacgactgtaacgtggtataaagctcaggattcccttgtaggtgcaagaaatcttataatcaacagtctgagttttaatccatttcatacagttaatttacctgatcgtaatgaacttacaaatgaaccagttttatttgctgctgctgatggcaataatgagggcgaatattacttaaggtttatttataaatcaggagacgttagggactactatagtgaggttgaaacaagacctttaactaaaatgtgcacagtttatgtgaatgaagaaaagggaattgtcgaaataagaacggatcataaagctgcaaaagaaatcacttcagtactttttagaatgctaagacaagaaaaattcatggagcaacaacgtgtcttagctccttttggtaatgatgttgaaaaacttgcagacgcacttaacggagcagtaattgatacaatatctaagcctgaatatttgttggaagaattttcagacgagcaagcagaagcgacagtcaacattttagcagctttggatgaattttttggagaaaatgatttagagcaattaagacaaaatttagaacaggcccagaaaattttcggagaaaacttattggaaacgccttttacggcaataatcctaacaggacttcaaaaggtatctatggggtctcataaagagttaagaggtcagcccctttatgattttttaagaccttatttgcaacaccagactggatttattcgcttccctttcagagaaccggaaactggtactgttgaagaatatactattagggtaggcttaagagtgaacagcatttatttcgttacaccggctacagaaaatgtaatgaattatgtgcgcgaaagaataattatatgatattattaacacagcttttaaactgaaggagggatctgttgtgtcggataaatgggaagttgattattggattgaagataaagccagatcaatgataaagagcttttaccccactattgtatctagggacacagatatacccctttcagtggttttcggtaggctattagagttatcgagggataacaagttgaacttaaaatgggaaataaggtgccctgaatgctattatacgttagccacacttgatgatttccctgatttagttaatggaaagactgtttattgtaatgaactttgtcatgaagagcatgaaataacagcagattgcatttttccggtttttgaattttctccggaatacaaaacatcgataaaaaaaaaagcagtggcactaaaaccaaggaaagaaacagaaatagaggacaaagtcctggtcccgtgtctatcatagataatggattgtttgatcaagacgcagtgaatattcttaaggaaatgtcaccaaattttgagaagactttagacaaagggctattgccacacattactatgtattttggaggaaatcatatgaatgatcatagaaatatcggcgatgttagtgttaacggagacaacgtaaatgtaatgggagatcataaccaattcaataaagtaactattacagaaaaacaagagattgataaagcatatgaagaactcttaactgaagtcaaaaaaattcaggatgagaacaaacgaggtactatagagtttatgacacaacaattaaaagaagcaatcgataaaaaggattcagaaaaaggaaagaagataattccgttaatacaaggagctattgggacaattgggtcgctaacaaccattgcaaagttttttggtgtaacaatttaaagcccttttagggcttttttatattatccactttttctttagcttatcccacttcaaaatgcgctgcctcatcaaatttttcaccgcatcacggatcgtctgttcatctttcccggttttccttttcaattgttccatggagggattttttccaaagcgggtcatattaaaaataatccgatacactttacgctcaaaatcggtcattgcgattcaactcctgtaaggaggatacgcgaacttatgttttgttgtcaataaatctgatttggggacagttggggacgaattggggaccaacttgttcatttttagccaaaacagaagattttttatcagaaagaacggtcagcaaaccttataaaataaagtttcaaaataaaacatcagttcgtatcagaagataatcactaccttgacagggtagaggtcgctggttcgagcccagtcggaatcatcaagggtttcagcgtgttggacacttactcgtgtcacactggagtcaaaaaaagaggagtcacaatttaatgtgattcctctttttgtttgccttgtaagataccactgataaatgtggaagcatccttttgcatgtttggcattaaatgcgaataggtgttaagcgtaacctggatgtccttatgccctaacctttcttggacgactttaggatgaaactttgttaacagtaaggatgcatgagagtgtctaaggttatggaatgggatatcaggtaaatcaagctgctttaaataagctttgaactgtcttaaaaggtttcttggattgattgcattccctgtatctgtacatacaactaaatctcggtctgtatagagtcctccgcataaactcttctctttcagtacacgacttctttgtttcttcagtatatggatatcatgttctgataagtcgatggtgcgtgtgcttgtcgatgattttccaccgtattttgtttggccaccagagtgttctagtgtttgaacaattctcaaaacgccattattgaagtctatatccttgaaacgcaagcctaaaatttcaccttgtctaagcccgaaagaaatcgctaaccaaaatgcgatatagtaacgactgtttttagtgtgatccaggaataaagacatctgttccgctgaccaaacttcaacttctttacgcttaactgatggcttcctaactttttcaactgggttctttttaataaactcatcttggacagctgttttcattacattgttgagtacgtgatatatcttctttattgtggcagccgataagccagcattaactaaccttgttataaatgcttgtaccttttgagttgttatatcgcttagtttcatgcttccaaaggcggggagtatatgatttttcaaattataatgataaacctttagagtttggttgcttacatctggagttttgatgttaagccaatactcaaccaattccttgaaggttgaatcattatctttaagaagatccccagagtgatataactggagatcttctcttaatgcttcttctgcatctttctttaacttgaacccacttcgtttacgctgcttccgtctgccgttctcatctttccctatatcaaacacatagtaccaattgccgtttctcttatctttttttactgatgccattaatcgttctcctttttatttttaccagctagggcgctctccccatccggtattgcttttttcgtaaccttcttttaatgcactgataacatgttccttagcatctttattgaactaatttcacctgttacttgaacagcaaaaacaagtcgaagaaaagaaaacaatgcttaaaaatgaacagtacacactggaactagaaaaacaaaagatattagaccatattgaagtagctaaaaaagcaggggatgacactaaagaattaaaagcccaattacaaatgaaaattcaggaacttgatgccaagattaatcagatcgctatcttagataaagataaggaaacaatccaaaattccatttctgagcttaaagaaacgcttaaatttgaaaaatatattacagacgatcttaaagaagaactttcagtttttattctggaaggagaatggtcgaatgatagcctatttgatgaaactgaactttatgaaaagagcatagaggagatggaaaagagaaatgcgccaccaattaacattaccttagatgtagttaactttttcaattgtctttctgaatctcataactgggataggtgttcacttggcgatactgttagaatcagatcagaagaactgaagactgatgtgaaagctcgacttgttacatttaattttgattttgctcaaaagacaatggatgtaacaatatcaaatggaaagaagattaaaagcgattttgaaaccatcagtaatatgatgtatacatctataaaaacaaacacggattataacaaaagaaaaattgactgggagaatgcaactgaaaatttcaatattaggaatgacagaatagctgtaaaacctaaccctccaattattaaaagagacggcacagctatatctcatacaaacaatgatgatggatcagtagatatcacaatagaatgggattatccaacttctaatgaagacaagtataatattgatggatttgaattgtatctatattctagcaacgataaggatgaatatgttttcggttcaaagatggccagtgaagacctgaagaatgtaaagtatgacaaacgagctgcagcgttcacagggttgccctctaataaatactacaccattggtattcaagcctatcgaagagttgatgcagatatagagataactcaattcattggatctgacatcgtaaaatcccttcacccaaacgaaaacccctacctcccttcttctactgtagaggtgagtggaaaccttaatggaaaagtaaacaatttgtatactatatcatcagtagcgaagcctgaaactccagaagcggcaacgatttggatcgatccaaagactaataaacaagagcttttcaatggtgaagagtggattgtgtcttctgcgggctcggctgattcattaaatggttacacggcttcaacactgtccacgcctaattcaatacctgtacgtaatgaccaaggaatcattacaggttctatagatgggaacgctgagtttcttggtggtaaaccatactcagaatacgcgctatcctcggatgttcctcagttggctagagggacatatgttggtgatggaacaattagtaagcaaatatcactgccttttactccaacacatgtgaaagtgtggccagtgtcttctaatgattccatgttattaattgatgagacaggaggttatacgtatcaggtaaatgaaatgggaatatacctgattggaggaaactctacatatggaattataaacgaacttgggtttataacaggctcagacggcaatcaaagagggaataaattaaatacaaagtacatctgggaagcatataggcatgtacaaaaaacaggcgtatccttattggatacgtctgttttttgttggaatagtgagtgaaataaccgataataagtaaagatgggaaggggaggttaatttgtcaaaaaagaaaatcatacttctaatatcaacacttagtgttgtggcagttggtattattctagctataacaattccgatgtacataaacagattagacaccagtaatttagactcaattgccgagaaagtgggaaatgataagggagtcaagaaaaactttaatcaagtgtggatgtctaaaaccgataaatccaatgataaagtatacgacttatctttagcagctaaaccatcttttacatcgctatcagataaagaaaagttgcttacagtgggtgaagcaatggaagtagctcaaaaaaactctaattttaataaaataaactgtggaaaagataaggtttgctcaatcagtcgtatctatattttgccggataaaaatgataaagcagtcagttatgaagttgcttatgatccattaaatacccctgaagaaaacactttactaataaaagatcgtgtagatgataatcctgaatcaactggtttccaaagaagagaagttacatacagcgaaaatgatgaacaacagtctgaagatgaagaatatcaagaaaagaaaattgctattggcatgaccaagcaggaagttatccaacttaaagattggggcagacctatgtctattaataagacaacgacagcatcaggaataaacgaacaatgggtttacggcagcagatacctatatttcgataatggagtattaacaacaatacaagaataaaacagctctatccttaaccggatagggctttttctttcggacatttgagtctaatctgaaaatagaccacacaataaatagacccctcacaaataactgtgagggggtcttttttgatttacaaactattttaaaggaagtatatattagtgtaataatttaaaggttaataaaaaagagcaggattaattaatctgctctttttgtgtgattaaattattttttatagggacgtcgatttaaaataaaattcaaaactgatgctataataagtacaattgcactgacaaagatcaacattatccccttatctttatcaagtgctattctccctactagaatagcaattataaatatcagaacgaaaaatatatttaaacccttatacagattcatacgaatcgcccctttaaagttaattaattttcatctctaactctgacagtttgcttccctttatagttcgttcgttcataataaactgttttaattctgaatttcttgttggatttcgggcttcttttgatgtatgttttgaacgacagatttccatgatacatctccctataactatatgcagctccacctaaaaaagatgctacagctcctggtgtcccaccaaagaaacctaccccagcaattacaatacctcctgcataagaaccagctcgtctgtccggatttttataatacagtttgtagtttttgggaagagtagatttcgacatacatttataagctggataacaagcttcagccttttttgtttcggtaaatgtcccagaaaccaatagagttagcacaaaacctaaagcaatgattaccttgacaacttttttcatttttaccattccccctttatttttacaattgaatactaacattaaaaaagaggggattaaagtcctacaaccttaaaataacattaaattaagcacataataaataggaatatatattatcagatgagaattattaactgttcctctcttcttattctcatccattacaatttcgatgactaatctaaagtgtgacctattttaaatcagttttttaatcgactttcaacatcaaataatcgcttattcaatagctctgtcttattatctacgttctgtatatgtttaaggtgagccgcaatatcttttggctgattctcttccaggcggtctaacttaacgttaatctgattaaattccttctttgtttcttctctaaaatcatttagctcagacttaatgcttttcacttctcttgaaagttcgtatattgcttgtaaaattttatcttccatcccgttcacctctccgtacagtataacagcaattgcaatacttttgattgtccgaaatttgttaccaacgaatatttcaatggttttgtttaacgaattttaaaaaaataaaagcaatacttttgcttaagactctttagggtcatcctctacaaactctacaacttcctgaattggacaatcaaggtactcgcagatcttgtgaattacagaaagcgctacatactcatctttgtttaatttggccattgttccaggagctagactcaagtcctgttttaaatccaaattcgttttgtccttcaatatcaatgtcacctttaatggtttataacttaattttaatggtttcatatttcaagatcacctgtttataattcaatttcttgaagtaattataacacatattgaacgtgaagaataaaaagtcttaataaaattgcaagaaagtgttgacttaaaatcgcataagttgtaatcttaattcaagaagttgaagtgatgataaaacaaattggacggaaggagcaacaatttgaaatcaacagctgaaaaagaaactaagccctcagggcaagttgtaatcaaaaagagaacctttttaggtgaattcaagcttgaagattacattgaccaacaattcaaaattgcactgagacaatgaggaggccttgaattgaagcgaataaccattcgtagaagtgatttgggtgacttaccagcaatgttgttttacaagcaattcgccatttctggcgaagatggtcaagtacatctgtatcaagtccttaaaaggaaggatggaaaatacgacagtatccattcagtattcttggcggaagacatcaaatacaaaaacctcagaagcttaaccaatgcagtaattgataagttgctcagtacacgattatgggatgctctcattgacaatagggagcttgttacactggaaggctatcagattcttgataaaaacaaaacttactaaaggggataacgacaatgcaaattaaccgtcacactgtaggaactaacgtagcaagcttaggggcaatcacaaacgaacagcgtatcgaggaaatgacgaatcatttcaactattttagagggaaaatgttcgaagaggaaaacaacttcattgaaacatacgacgatgggaaacctaaaaagcgtctcagaatcttcacagatatgacaataccggtttgtgttgaacttgatgcgaatgatcggaaagacggaatagcagcgttagtagaagcaggagagatgggtgttaatttccctcatatcatgttggatatgggggggaggtaaaacagttattccaactgtcactgacaatgtgttttgcatagatgaaaaagcaactgtagtagaagtggaagacgatgaataagacggatttacataatgaacggttctgtcaggttgtatttgggggattgatcgtagttataccagctttaagcatactgtgcatagcgtggtttgggtgattaggaagagtgtcaccagcactctcctaatctgatgggttagtacactcccattgtatttaaacataacaatttaatcaaggggataactgaaatgaaaaacacatacaccacttatgaatttaaagcatatgatagttgaaataatttgttgaaagaaaggtttacatgcaattacaatgatcgcctttattcaatcataaagtggattatcaagaaatgtcctaccgttgatgtgattgaatgcatggtatctgaagtcagtgaccttgctttcttaaagagtgagtatgtcgatatcttcacggtgtggaaagcagacgattaaatagacagagaggacgggagttaaagtccctgtcccctataatctcaatttaactgaatacagtcagtctatactcctgaattaaggtgttgtctttagtgatgccttttttcgaaggctccaatatggcgccatcgccacttgtggcaacgaaagagactgccgtggaatgcgctaacacacgtaaaacttgacagggtagtgactcagccgacgcaaaaaatgaggataggatgccttctgtgtttccctatttacacatgcatctgaaaggcgaaagctgccattaagtgctgacgaaggaagggtgtatcgtttctgacgatgcaggacaagccataagtatcagggctcagatttgagctttgagaacctgttagggacacttgacacagtaggcttgtttggggaataaccaacggcaaatagggtgaacacacggataccacaagttgatatacaatcaagtttcagtcgcctgcctgagtttgtttatttttttacaagcaaattcaggcagacaactcgtacagccgttgtccacagtctcaaccaatcaagcaaaaaatcaaaagaaaagtcaagacaaataacaaaagttttgatgatgaatggaggttaaagtgattgaaagtgactgtaaccaagaaggagcacgaggacttagaaatgtttcacaagatgatgggagataagaggttaacaatatcacaacgaagacaggcgagaatacggtacgatatgatctataaccaagcgaaaagaagaacgctactgaatgagtacaaggggcgtttgtgaggttcatagtgaacctggcaaggtgtagttcatgatgaagctctgtcactcctcaattttgaggagtccccaactttgggggctgagactattaccaattgtaatagttgggaggtcgtacccaaaacgtatacgaccttatatcactcattgacaaattagcaacgactcaatccacgaccacaataaggtcgtagacaaaataaccacgaccacaataaggtcgtagacaaaataaccacgacctcggtaagctcgttggtaaaataacaacgacctgatggaaactatcttgccatcagctgtgacgaacaatattcagtgcaggtcaaagtgaaaaccggttttaacaattgaaatacaaaaaagccggatgtttataacccgactttttgagaagaatcaaacacttttctaacgtacaatcaatgtaaataaaccggcaagtattataattgctccacaaactgtaataaatgttccattttttcgttgttctgatttagctgttattatccctctgattagataataaaggccgactaatattagagtccaataaaagaaagcgccatttaaggtaaaccctaatatgagaaataaaagaaccaatgctagcgatgtgtaatggaaaagtctgaatgtaagattagtcattataaacctcctagtttaaattatcattaaaatacaaataatgggttgaattgagctgaataaacctcaagaattgttaatgaataacaaaaggaggtattaatttaccatgaaaaagattgtcctttcaagtgttgctgttttgactgctgttacaatttttagtcctgtttcagatgcaaaagaacgtcaagccccaagcgcagttgtccagaatgttgaaccgacttatgaaactgaatctgtagattacaacggaactacgtacactttttctgaaagaactgttaatgatgtagttgagattattgtaaatgatggggaaaaaacagacaagattcaatatgaccagaatattggaaaacttgaagttaatggcgaagtggtgaattatgaagaggcttcatcacctattgaacaattggcaaataaaaacgatacatcggctgggatcttgagagatcaatggtcaggctataataatagtaaaggtacttatagtacgattagtgccagtttgagtataatttttgcgtttgtgacgttttctactagttctgaatttcttgatacacttttgccgattatttctccatcgcccttgtatcttaacattaatttaggttttttaggatcatcaatccaattttcgattttctttatattttttggatcgtttaaaactgaattagcaattctttcagcggtagccctatctttaaaagtagatgaagctgtaatatgtgggttaggatcagttttcagtctttctattaattctttatctgttttcccaacatgtctttctataagatgcccgccttttgcttcatgagcagctaagccaccgcctggtgcgagaggactgctgtctccttgtttaacactatgtatgccgctattgtcagaagacacagattttctgagcacactctctttctgatcttcaataatacttttcaacaaaggcgtattcttcacattgtgagtattttcaatatcctgtgctattccggcaagcgctggttcgtacttgtttttcgaaacggaattgatataattttttcctttttcaatcacggttttcacatgttttgcagctgctttttcaccggcttccaagacgttatccactttggcggcacctgttttggcgagcttgcttgatacttttacagctgagccggaaccttttagtacgacgatgcttatttattgattttgtcatcattcatcgaggggcgaattggggacggaactgctttttgggctaattttgaagtacattcgctgtatactgcaagggagataaacatcgcctttaaggcggcggtctttgccgaaacctgttcatttcagagaaatacagaaatttcgtatcactgaacggctaaagtgataacgatcagcagctggttaatccagctgtttttttgtatttgaaaaacggaatatttagttttttatggcaaatacagcggcactccgaaaatcattcacaatacaggaaatgacgcatgcggccgccaatgaaatcagttatatgtcgggtaacagcgaatcgacaagctatcattttgccgtcgatgataaagaagtgattcagggggctcttcatctgaaggcaagaaagcatccttcctcttgtcttccggttttttaaagttgaaaacccattaaaatccgaggggagagcataaaacagattcgaacggcgctgtcgcccttcattatagcgaaagaacttcgggattgatgatgcatatggagcgaagacagcgaatgcagtaattcgatttcaattgatgaatggattaaaagctgatggaatttatgcgcttgaaccaaagtaaaacttgaagtgttgttaaaataagcggagaccctttccttttttacagactctctcccacactgacaagaagaggtttgtgttaaagcaaaatctaagaaattaaacccaaaaagattgcaacgacaagcttctaaagagatgaaaaatatcgggatatcaactaaggcataaaaagcgataaaacaggagcttgaaacaagaaaaaaaaacaactgaatagaaaataaagagaaaaaataaaggaacaaaaatatttaatcagaaaacaaaaagcaaaagaaaagcataggggcagattgaaaagttgagcggcatcagttttttgcttcggactgatttagagaaaaagaagtataagtcagagcccttctcaagacgaggagggtttttctgcaatttattcaaatacacttacatcagtaaatgcggctgaacgtttcagtacgattcagctcatgtatggtttgaagccagacggcatttacggaccaaaaacgaaagcgaaattgaattaataaaagaagcccttcttataagagggctctttttctctaactatgttgttttaagatgttttttaatttgttcagtgacttgcttaagccattctaatggagttaaatcatcttcaggaaagtatataccatccgctgcttcctctataaattcattcttgtcttcttctgaatgatcactatttacaaactcagttagtgctattaaatctctttcttttagtttttgagatgcttcatttaaatattcatcaagtgcatcttccggagactctatatcttggtggaaatgtccaccgagaaatctaaatacaggatcagaaactttaatttcaatcattatatatcacctcgttgggtagcctgttagtataaagctaccatcttcatttttctttaatactattctagcattagtcatatctttaacttcatttgaacctttacgaactcctctacctataacttcggttcctctataaggtaacggtaatggatcattaacatcactttttaaccactcttcaatttcctttttatgtttagttaatgtttcattagcgactctttctgcagttggcctatcagtgaaactagaagaggcccgtatcttcttgtttatctgtagcctctgtaataactcttcatcagtcttaccaacatgtctttctataaggtgtccgccttttgcttcgtgagcagctaaacccccgccgggtgcgagaggactgctgtctccttgtttaacactatgtatgccgctattgtcagaagacacagatttactgagaacactctctttctgatcttcaataatacttttcaacaaaggcgtattcttcacattgtgagtattttcaatatcctgtgctattccggcaagtgcgggttcgtacttatttttcgaaatggaattgatataatcttttcctttttcaatcccggtttttacatgttttgcagccgctttttcaccggcttccaagacgttatccactttggcggcacctgttttggcgagcttgcttgatacttttacagctgagccggaacctttgagcccgacgatgctcccgatggcgtaagtgatgtaatgtgatcttgaatacgcatccccgttaaccattttatcattccatgaatccgccaggtttgtccatatgatttttgcgtaggagggtgtgttcaatacagccgatatggttttagcgactttttgttcatcagagagatggtaaaaatcccatgcaccgacagccagatctttgacgccggttatggtgtctttcccgacatcataaaggccgacgcctattcctttaacgatatcccaagccgtttctccgacttcttcgagctgttttgcttgttcaagctgcatcacatattccacctgagcaggttcaaggttttcatagccgatcttcttcgctatttccaaatactcatccggatcggtcacaccatcggccagctttttctttagggccttaacttcccgctctttcgcctcttcctttttaatcgtcaaataagcatccgaatgtcttgcaatctcgccttttttcttatggatgtcgctttcacggtacgccttggcgttgtagtgaagcggcgtggcgctttttcctttgcctgtggcgttttggagctgctgaaagtcggcttggatgaactgttcgttcgcttcggtttctgcgtattctttcgttagatcgtgatcaagcttgccgagtttatgtatcgtgtcgcttctttttttgtcagctgaagaaagcttttgttctgtgctttcggttgaaaacaattcgagcgagatgatgtcatcgatctttccgaggatggagcacatgtcttttttctgctcttccataatcgcctttgatttactgagggcgtgggtgagctcatgctccagaaatgattcttccacatgcgaattggaaagtccggagtcttcgaccttgccgggaaggcttgtgagaaatgcgattttcatatcgatcagatcaagccagctgtctgtgacgccggcgtggtccttaaaaaaagctttgatgttatttgcgccccggcctgagaaatcattgtcaccaagatcagccatgccttgaaacgctttttttaggttgaccatctggccgcgcagttttttgtattcactcgcgcgctgtttggcagcggccagcagggtggttgcttcgaaaactttcatgaccataatcctttcattcgaaatacttcaacaagatattaccatggaagaatgaagaaaaagacaaataagtattttgaaagtgcaaaatgattaatttgttctgggtaaatttacttattttatgatcgggaattggggaagagttagctttaggttgaatcggttgttagaacatcatgtgacgcacctcctttacaaagcatacacacatattagagggctgaaattcacccgtatgaattggatacggcggcccaaacggcttttcgcatggaaccaacatgcggcaactggtcaacagctttagaaacttcatcctaacagggaaatgcggcgagcattgggaatataaagaaatataggctttacagctatgcaggatgtatgaatatccgtcagccggcgaaggaaagacaatctccatgtgtcgtgacagttcggatgcgggtgaatggaacttcccattcatccgctgttatgtcaggggacgaaaagactttttttgaggaggaagcggaatgattaaatttacacggccatcgcctatgaagaaaacatgcacgatgcacccggaaaaggaatctgtcagatcggtttcgtttactgattttaacggcaattctgtaacagtaaccctttgtcaaatgtgtctggctgaattaaaaatgaaagccgcgactgaatacaggagcatgaccgaggagcgggccaaactgaatcgtttcaagattggtgatcatgtgtatttagagcatttgggagtcgtcagcgagataaaaaacatggaaggcgttcaagtggcaaacaggacagacgcagacggagtgcgaaaggctacccctaaggaaatcgcagaatacaaaaagcaggagaagcaataacaaggaaattctatcagcggtattacttacgggagcggcggccgttgcgctgtctgccgaagagatagcgcagttattaggggttaaaaaaggaattatgtagaagaatattgagcgttcccgcatgaaaatgaaaatagagcagatcacagcctattctgtttagcgtgaataggttgtttatttattgaaacataagaaaggttttcaaaaaaatctttaaagaatactattgttataggtataatggtgttgtttattgtaacaatttaggggatttaaagagggtgatgttaatgtacaatcttaaagaacgtgatgcaattaaacggttcttaaatgaggaaaccgttaatacaagcgaagcaattaaaatattgggcttcactcgtcaatacctaaaccagttagttaaagtggggaattagagccgatgaaagaaatgcctcgggacaggctttttctgaaagaggatattttggatttttaaaaatatagaaggaaatgagcaaatatgaaaaaattaatcgatggttcaacgatcttattctttattctgtttgtgatattgttcactaattttaattatggttttcttagcgctatcgacatcattactatgattttggctttgatctggttgatattgacgataattaatataaccctaaaatggagaaaccttcgaaaaggctaagtttatttttgagagtatagacgagctgagagattttatggataaagaatcataacgacatctgaagccattgaaataatcggatgcagccggcagaacctcaagcagctggtggattataaaacattggttccgattaaaactacgaacagagatcgcctattcttgagaaaagatattgaaggctataaaaagaaacgttgattgcaccctgtcaaaagggtgttttttcgtcttatggttgctacttatttatgaagggtgctttcgttcgacaaattttgcgaatggttcctttctcctactccttaaccgataataagatgagagggggcagaagagttgaaaaaaatatttataatcattcctatactgatttttgttctatcaggttgtggcgtggatacaaaagaggctgaaaagtttttaaaagagctgtctaaaaataaaacggtatcacaatatcttagtgaagcgccaactttagattacactaatcctataaagaagtattatgattttaaaatcaacctgtccatgaataagaaattcacgcaactttctaacaaggaaaaatataaaattctttacaaagtttatgagttaattgaggataaaggtttttctaaggtaatcagctgtggagataagtatacttgttcagtagatgaagtacatgcaaagtataaaaacgatgattatacaatcgattttaaacacggggattctttgtaccagttagaaaaaaatgatgaagtaatttttgatttagaggatgaaaaagagaaaagaaatgaaaattcatcagaagaagaggcacaatcagctgatgaccaaaccatatataattacatggaaaacgaatttaatagaattacaaattacggggaaaattacaccccagagatccatgattcaatggttactgagctagcaagcgaaaagtttggtataactgttgatgaagcaaatgaaatatacgtgagcatgtctatgaataaatataaataaatataacaggcgtaaatcctagaataagattcataattctaaagcacctcattccgaaaggtgcttttttatattctctgtaaactgattctggtaaatctcaggaaaactattggtggttaacggtctgagtgcggcgtcggtttagagggaatatcttttcaaaaataaacacgaatcagaagggggcgggggtgaatgaagatggccgaaaagcatattcaggcgtataaggattacgtcaaaggcatgaaatacaaaggccttgccgagaaatacggggtgacagtgaacaccattaaatcgtaaaaacagcggcggggcggctccggcaagaaatcaaacgctgtatcacacgggttcttctcgaaatatctgccggaagaaacactatccattgaagagattcaggggtgttttcaattaaattttcagctgatttcctaactgtcacggaaaacatcacacaggaattatattgactttcatcctgtttgtaatgttaattagaagatgtatacaaaatcattataatgaggaggtctggatgtgaaaaataaagcgagaatacaatttggaatatgcattggacttttatgtttaagctttaccggtttcaaccctttattcggctcagcgtatgctgaagcgaaatctatagaggacgcaaaaatgacaagctgtataacgaatcagaaatttgttcagcttgagaaaaaatttgatgccaggcttggggtttatgcgattgatacaggttcaaacaagacaatcgcctatcggccgaatgaacggtttgcttacgcatcaacctataaagttctggctgccgctgctgttctgaagaaaagctcaaatgaaaaacttaatgccatcatccgctacagcaaagacgatttggttacatattccccaatcacagaaaaacacctggatacaggcatgagcctgaaagaaatctcagaagccgctgtccgttacagcgataataccgccgggaacctattgctgcagcagcttggcggtcccaaaggttttgaaatgtcattgaaacagatcggggatcatgtaacgaaagctgatcgattcgagacggatctaaactctgcgattcccggggatcgtcgtgacacaagcaccgcaaaagcactggcaactgaccttaagactttcgctttgggtaacactctcacggctgacaagcgcacgattttaacagattggatgcggggcaacgctaccggcgacgaactgattcgggcaggcgctcctgcaggatgggaagtcggcgataaatccggagccggaagctacggcacacgaaacgacattgcgatcgtttggccgcctgacagagccccaattgttttggcaatcctgtcaaaccggtttacggaagatgccaattataataatgctcttatcgctgaggctgcaaaagtcgctctaaatgctcttaaataaacattgccgttcatttttatggacggttttttatatgttgagaatgcggtatgccggtttcgatgttataatgtaaagccataaaatgatgggaagagggggagtttcgatgcattacataacggcatgcttaaaaatcatcagtgataaagaccttgatgaaataatgaaggaattcaaaaaacttgaggaagaaacgaacaaagaagaaggctgtattcagttccatgctcatccgcttgaaccatcagaacgcaaaatcatgctttgggagatttgggaaaacgaagaagctgttaaagtccattttacgaaaaaacatacaaaagacgttcaaaaacaagaattaacggaagtagaatggttaatgaaaagcaatgtgaatgagtaaaaggctttgtctgttgttggctgactttgccggcaaccatcaacagttttattcactaaaacccttgctgtgcaagggttttttactttaaaaagttctttatatggcagtctttttatgggtaaggaacagacttggaatgaagatggccgcaaggatgatgacggatactaagaatccggcatggtagccttttaaactgttcgaaatcgtcggctgcaatccttgtatgacagttgcggtaacggttgcgatcacagctgacccaaagctggaaccgaggttttcaatcatatgaataccgacacctgcttccggaagctgtttgctgtcaagacctgtataagcgtcactcatcaatgggagcataattcctccaaaactggtgccgcggataaataatacgacggaaatccaaatcatacttgggttatcggtgataaaaataagcgggatagatccgatcagcgaaagaacaagactgaccgtaaccacgtatttcgcaccgatcttatcaatcatttttccgatcagcggacgagtcacgagcattccgactccttgagggattaaagcgagtgctgctccggctgccgtgaactgacgaatgttttgaaaaaacagcggaagtattaacatcggccccatgatggcaacattcgctaagaacaacccgatcgaagatgccaagaagcttttgtttgcaaacaaattcataggcagcacggtttggtttttcttgatctgattatatacaagataaatagctgctgaaacaagaccgatgcccgtccataaaatggtgtcgctattgttaaatgatgcatgatccgccgcttttgtaataccgtacatcaatgccgcgctcattaatgacaaattgataatcccgaaaatatcgagtttacgatctttgttgaatggttcaaagtctggaatggttttcatcataagcggtgcagcaatcaaaacgatgaacacgttgatgtaaaaaatccaatgccatgaagcgccttggacgatgaaacccccaatgacaggtcctaagatcgggccgaagatcataggggtgctgacgattgccatcacttttcccaggttttccggacctgccgttttaaccaagagtgttgacataagcggagtgataatgccggcgctgaatccttgaagcaaacggaagaagatgaagctggaaacgtcacggctcattcccgcaaaaacagaaatgacaccaaaggcgatgactgagccgatgaagattttcttaccgttatatttattcataagccagccggatacgggtactgcaatcgcaagtgctaacatatagcctgtaacggaccactgaatgatatccaatgtcgtgttgaagtctttggtcagtttgccgatggcgatgtttaccatcgtagagtcaagcattggagcgattgctcccagtgcaatagcccaggcggctgtgagaacttcttttggcacccgaagttcctttcttttatgtgttgacatagtattctcctctcaaaattgctgtctttgtttccttgtcaacaaaataatagagtggttttgtttctttgtcaacaataagagggatataaaaaggcagcccgttttcatggagcagggctgcctatggttttattcatatttattccgatttcatgtctgcaccaagtttctttatttctgaatctaaatgcctgctgtatgtttccacgaagttcagcatcgtgtcaaattgttcatcagttacttgttcaaatacgattttgtcccgttcttgaaactctttgtgcaattcctcgtgaattttataaatgacttttccttgctcagtaagcctgaaatagatttctttcttgttaagcggcttctgatagctttcgataaggcctttattaataagcttcttcgttaatttacttatggcgccttttgtcatataaagggactccgcaagttttgtcacattggcgtcttcaattttttcgatgaattcgatgcaatgcacttcagaaggtttatgccccttaaggctttcttccatcttcagcctattcagccacaccatcttgttaaaaaagtccctgaaatccgtgaggagctgttcttttttgtccatgtcccgtcctcctgctcggtggtgcttacacaatattataaaatgtttgtttctttttcaacaatcgtaaagttatgatttaggaactgagagatagtgcgcagaaataagaaggagggggaagagaagaagtattctatttaaaaagcggtttttaaccgaaacgtgggtttttgagtatttttctttccgtattcgttacttgctctgtttcataacaggctaacactagagccttataaaaaagcaggctgcgcaatgagcctgcttgagaatcgcatcaatcattttcctgttgcggcatcataaaaagcgtcgattgcggttgtgtatttcaagacgtttttagacactttggcggttgcgcctaatgggtacgcgtctgacagaacgctggagtgagcttcgggttcccagtaaaatacgccggttcctttgccgttcggaacggctttcaccagttttatggtgtcttttatggtccagtaggaatctttcggattattttcatctccgcccagttcaaccaccatgacttccttgttgtagcgtgaggcgatgtcattcaaattagttgataaatggctggtgagctcccagtacggcttgccttcccaatagggatagaatgaaacaccgatgatgtcggtttttcctccgtttttaaagaattgatcaaaccaccatctgaataggctgttgtccgtgccgtgtgccaaatggctgatgaccttggtggccgggctgacggatttcacggcgtcatagcctttgttcagtaagccggtcaatttgctgaaatcgttcgtgctgccgtcgggcagtaaaattcctgaattcatttcatttcctacttgcacccaatcaggggagatgccgtgatttttaagttctttcatgacatcgtacgtatggttatacacggctgcctgcagctggctgtttgaatagccgttccattggttcggcttgatctggtgtcctggatcagcgaacacatcactgtaatggaagtcaaccattaccttcattcctaacgcttttgccctttttgccgccgcaagtacgcccgctttgtcactatagccgagcatggtccatgttgtgccgtctttcagccaataatagctgcttggcggattcacaaacactctcagtctcacggcatttattccgtgatctttaagaatctgcaaggcatctttctgttttccgccgtcatccagccagcgcacaccttcgtcctccatttgtttcagccatcctatatcagcgccataggcaaacggggcatccgcttttgctttaggagacttctcaaagaatgtaaaagcagtgaaaatgagagaaagacagattgcgtttacaaatacacgtttcaatcggtttttgaacatcacaatacctcctgataaaaaagattgttgattgatttcactctgaatgtttcagctgccattctccaataacgtcgtgaaacgctgaaatgcctgaattccttcgggtgtcattttaaaaacgcctgcatcggtcagcgcgcgtaaaaatacattcgcggtttctttttgtaaaacagcggctgcattttccggtgtcacgtctttatccgttttgatgttttcagcccacggaagatgaatatctttgatgtcatgaggttcattcagtaaatactttttcacttctgccagctcatctttcaggcggggaggtaaaacggcgagtcccatcacttcaatcagaccgatattttcttttttgatgtgatgaacgtcttgatgcgggtgaaaaatgccatccggataatcttcggaggtgcggttgtttctgagagcgagatcgatttcaaaatccgttcccctgcgtctggcaattggagtgacggtattatggggttcatttgtctttgcgatgatgctgacggtttcgtctgaatattcccgccacttttcaaaaacatacgcagcggcatcggtcagcaaatccggatcttttgcgcgaaggcggatcactgataccggccacttcacggcttcggcctgaacgtctggaaaatgacgcatatgaaaaggatagagggaacccgcttttgccatgggaaactcatgggcgccgccttgataatgatcgtgtgaaagaatggaacctcctacgatcggcaagtctgcgtttgatccggcgaaataatgcgggaaaatttccgtaatggccagaagccttctgaagctgtcacggctgatgttcatcggcttgtgcacgcttgatagaaagatggcatgctcgctgtaatacgcataaggagagtattgaaaaccccattgttctcccgctaagtcaagcctgatgatgcggtggtttgaacgggcggggtggtgcggtgtaccggcatacccctcgttttccatacagagcagacatgtcggataccggttttccggactgttttttaccgcggcgatgtctttagggtctttttccggttttgataaattaatggtgatgtccaattctccaaaaggtgttgatgagcggtacacgatattttttcgaatggcccgcgtcttaatatagtcgttgttttggctcagtcggtaaaagtaatctgttgcttttctcgggcaatctgataacaattcgctgaacgcggcattgatgagagaaggggccggtgtgatcacgtccatgattctgcttcccagcatgtctctttcagccggtgtatcgtttatgattgaccgttttaccgcgtctttcaccatttcgtccaaatagtggagcctgttttgtttcttgatatgtttcggttctgcataatccgtcagtccgagcagatcgagaagtctgtttcttgtataaatcacatctgtttcatttatgtcgcctaagacagtgctttctttcagaaaccctgtcactgattcaaaaacttcaatgaccgccgcctccatttcatttgtccttgtatccgtttggatgttgccgatgccaattccatgctgacgcaatgatttccgatatgtccgtttgtttcggattccagcccagaatgttccgcgctttatcgctggaagcgatgagggtgcttggatcaccgggtcttcttgcggccgctcttacttttatgtctctttcggtcacttgccgggccgcttccgtcatttctgatacggaaaacccgctgcttgatcctaaattgaaaatgccgctgtctccgccgttttgcaaatattccagagcgagaatatgggcatcgattaaatcggaaacatggacataatcgcggatgcacgtgccgtcttttgtatcatagtcagtgccgaatatcaaaacctcctcgcgctgaccgagcgcggtttgtaaaaggatagggattaggtgggtttccggatgatgatcttctccgatggaaccgtccgttttcgcgccggcaacgttaaaataccgaagcgagacatattttatgccgcaggcggtttcacaccacttcagcaatttttctgccatgagttttgattcgccatatgcgctttccggcttttccggcatgtcttccgtgatgggcactttttcaggttcgccgtatacagcggcggatgaagaaaacacaatgtgtttcacccgaattcctgcatgacctccagtgtaatttgcgtaccgtacacattattattgaaatatgaaagagggtctttcattgattcgccgacaagggattgagcggcaaaatggagaacgcctgttacgttctccttcgcaaacacagagtgaagaaacggtttgtcacggatatctccatggtaaaaaactgctttttcatgaacagctttccggtggcctgtctgcagatgatccacagctatcgttttaaatcctttgtttaataattgatcaaccgcatgagaaccgatatagccggctccgccgagaacgagaatcgccatgatttatttttccctccattcagccgcgccatcgcttatatccgcgatgtagaaagaagcttcaagacctgtcctgctgcggtagtgagatgaaacggctcggataaagccggtggtttcttcattttccacaatggctatggcgcagccgccgaaccccgcgcccgtcatccgcgctccgagtgctccttctttccaggctgcttcagcgagcgcgtctaattcgtcaccggtcacttcataatcatcgcgtaacgaacggtgggacgcattcatcagctcgccgaacgttttcaaatcatttgatttgagagcttccgcggctgagagggtccgctcgttttcgttgaccgcgtgccgggctcttttacgcaaagtttcacaggagagaagggattcgagttcgttgaattcttctgccgtcaattccgcaagtgatgcgatattccgatattgccgcagttctgaaagagcctcgtcacattcgctgcggcgttcattatattttgaagccgccagctcccggcgcttgttcgtattcataatgacgattttatatccgttaaaagcagccggaatcatttcgtgctcaagcttatcgcagtttaacagaatggccatgttctttttgcctttttgcactgcgaattgatccataatgcctgaattcacgccgataaattcattttcgactctttttccgataagcgccagttcagtatcggaaacatccaggctgaataactttctaaaaatggaaccggttaacatttcaatggaagcggaggagcttaaaccggctccgtttggaatcgtaccgtgaaaaagaatatccattccgctgtctatttggccgccggctttaagaaggtaatggatcatccccttcggataattggcccagccgtcttcttttttgtatgctgtggcggaaagatcaaggcagacaatgccgctgtcaggaaagttttctgagtataaccggatctggtgatctccgcgttttgcgcatacggcataagttccgatcgtgatcgcgcatggaagaacgtggccgcctatataatccgtatgttccccgatcaggttgatccggccgggtgcgaaaaacagttctccgttacttctcttgaaaacgtcttcgaatcttgattttaaaagtttggcatccatgataaacctccgattctattttgaggtatgctccagtatgaactgaatggctttttgtgaatttctggtgaggctgatatattccgctcctttcgttgcgatgagtttcacttgcaggcggtccgcatcttctttaatgtcatcataataagagccgacttgcggagctaaaatgatcatatcgaagtctttcatgatgtcgtaatgggaaccgtaggcgcctgctgaggcggtaatcggcacgttatattcttcggcaccttctgtcagtgcgttcgcaagcatggcgctcgttcccgctccggcgcacagcactaacacattggtgctgtgttccaaggcggatgaggattcctgaagatttgtgctgatgacggaggacgcgtcttcggaggcgccggccatggcgggctgtaatgtttgcggcgcggtttcaggctcggtgtgttgggcttctttcgccgctaatactttgtcataagctttgcagaatggcaggtatatcaggaaatcgacaatgattaatacagccgtcagcacaaaagccgagagccccatgccggttccgagaatcaagccggcgggcgccggggtggcccacggaagaacatacataaaactgttcattccgatgacatccacgaaaaatttaaacaaacagacattcaccatcggcgttacaacaaacggaatgaaaaaataaggatttaaaatgatcggcgcagcaaagagcagaggttcgtttactgcgaaagacaccggaaccgcggatgcttttccgactgctttcaattgcttggatttcgcgaaaagaagaaagataaacggaaccacaagggttgcgccggttcctcccattgtgccgacaaagttcccgagtccgacggtcagcacgttggacgcctgctcaccggcattatgaagctgcaggttcgcctccacatttgcgtaaataatagctgcgatggccggttccacaatagaaggcccgtgaacgccgacaaaccagaacagcgccatcattccccaaatgacacaaatccccagataaccgtctgcggcggtaaaaaacggcgataagagagaggagagagcctctgcaaacgatacgttcagcgtgttcctgatcaataaatcaacgatcaccatggccaaaacggaaaaagcgaacggaaaaacatctttaaatgtttgtgaaatggtacccggtacttctttaggcattttaatcgtaatatttttcagcacgcagaatctgtaaacgttcactgttatgaaagcggatacaaaagcagctaaaagaccttttgtgccgaggtattccgtggagaatccgccatcaatttgagtgacgcttaaaatgagaaacccgacgactgaagcaagcatcgctgaaacggggttgatccctttgtttttcggcatttttcggttcattgattcactcaggcatttcgcacttgttgccgcaacgatcagaccgagggcgcccattgaatagttataaactttccaaagccattcagaaacacttttaggccaagtgaaacccaacacttccggcacagcggcggtgaggatgaaaatgctggcgaataaaataacaggcatggccgttaagaagccgtcgcggatcgcgcctaaataaatgtttcttgagattttttcgaaaaacggttttcccttttcgatttgcttgatgataccattcatttttccactccttatcggcggcttcggtagagttctataaaatcctgaataagatcacggagcaaaagggttgtcatcaagtggtcctgaccgtgaacgaaaataaatcctaattccatgtccttgccttcagcttcttcagctaacattttcgtttgcgcattgtgggcgagggttaaattttcatcggcgcttttcaatgctgcttccgtgttttcgaagtttccggcacggacttctttcaggactttcaataaagtgcttctggcgtcgccggcataggcgacgatttcaaaaccgagcatctgcaattcttcctttgtcatgaaaaaaacctcctaaagacggcacacatgatgaaaagagactcttttcaccatgtatgatcgttaaatgattgtttttgtttcacttacaagtttgtaccagtaggccgattctttcggataccgtttttgggtgtcaaagtcgacgtaaaaaagaccgtaacgtttgttgtagccgttggtccatgaaaataaatccattaaggaccataagaagtacccctttacattgactccgtcggtaatcgctttactgacggcttctaaatagacttttaaatagtcgattcttgccttatccataatgatgccgtcttcaaactcatctttatagcccatgccgttttcggtaatgtacattttgttatattgcggatagtcccgtttgatgcgcatcagcatgtcatacatgccttcaggataaatgagccagtcccaatcagtccgcttcaggccttctttgtaaattctttcgccgattccttttactttatagaccgaagtgcccttatcgcccgttccgttatgatgaataacggtttctccgtcgtacgctttgacgaaatggcattgataatgattgatgccgagataatcattgcgcgttgaagcttttttcatcacgtcaaagtcactgtctgaaaactcgtatgaagcgccgtttgcctcacagatttcatccagagcccgcatggtttcctcagaataatagccgaggtaggtggcgtcgaggaggagtctcactgataacgcgtcatccagaaaacaggcgtgacggtcttcttctgagtcgctggcgggatattttgtttccaatgagtggacgacaccgatttctcccggatagccgccgtctttaaaaagattgacggtcatcgcatgcgctaccatcatgtgatggaggcattgaatgacttttgtgatatcacttttaacagatggcgggaaaaccccgagtaaatactggttggtggctgtgggataaatttcgttaaacgtgctccaatatctgatttcgctgaattctttaaagcaaaactccgcatagctgacgaacgcttctattgcagcgcggttgaggaaatctccctgatcaaataatcttttcggtgtatcgaaatgatgcagcgtgacaaaaggggtgacgttgcgtttatggcattctgagaaaatacgatgatagtaatcaacaccttcctgattgattttgcccgtgccgtcagggaaaattctcgtccaggctatagaaaggcggatgccgtttattccgaatttttcacatagtttaatatcttccggaaactggcggtaaaaatcacttgccggatcagggctgaatcttccctgtttttcaagaaattcatcccaggccacaggccctttgccgccttcttttgtggcgccttccgcttgatatgccgcagtcgccccgccgaaaataaagtcataaggtaatttgagcattactgaatcctccttcgccaatgtgtgaattgaagtttgttaatgtttgtaattgttatcttttgtttaatagtaaacgcatacatttttgttgtcaatagcttcataaagaaataacatctgtgttcatagggattatataagtttttcgttgttttatatgttgattatgttgtttgttagtgtttgtttttgttgaccggagtgccgcggtgtgttagattgtgtgtaaagttgaggggatgattgaacatgttaaaaaaagagcgtcttttaaaaatcatcgatatcgtaaactcgcggggatttattacggtgagtgatattatcgatgaactggatgtttctgatatgacagtgagaagagatctggacgagctggataaggccggaaaaatcgtacgtattcacggaggcgcacagagcatatcttattccattgatcacgaattatcgcataatgaaaaactgggtgttcaaatggaggagaaggggaagatcgcggaactcgcagcttcatatgtaaatgacggcgataccgtttttttagggcccggcacgacgattgaacttttagccaaacacctgctgcataagcgaatcaggattatcacaaacaactatcccgtatttgatattttaaagcatggtgacactgccgataccatcctgattggcggcgatttccgaaaaaataccggtgccttcgtcgggcccatcgtgaacggcaatctgcagaaattcaattttacgaaagccttcatcagcgccaacggcatacataatgatgagatttcttcttacagcattgaagaaggggaagctcatcaaatcgcgctgaataattcgcggacgaaatttttgctggcggataataaaaaattcaaccgggaagatttttacgtattctataacttgcacgatatggactatctgattacggatgataaagtgatgaaagatgttcaaattcattacgagcaatatgtagatgtcaaaatcgcaaaaaaataaaaaaggcgggcggttcgatgaaaggggttatttttgatttcaacggcacgatgtttcaagattcgcatctgcacgaaaaagcatggtttttcatggtgaaaaaatacgcgccgaaaaccatttctgatgaagacattttcgttaacattcacgggagaacaaacagtgaaatcctgacgtattttatttccggcgatttaacaaatgaagaaatcaagaagctgtcttttgaaaaagaagcctactacagagaattatgccttgaaaacaaagatgagttaaagctgacgaagggactgaccggcgtattgaaccatctgaaaaaatcagaaacgccgatgaccattgccacggctacggtaaaggaaaatgtcgagttttactttgacgtctttcagttggatcggtggtttaattttgacaaagtcacgtttgatgacgggagcttccccggaaaaccggcgccggatatttttctcatcgcatcggaaaagttaggcctcagacctgaagattgcttagtcattgaagatgccttttcggggctcacagcggcgaaaaaagcaggtgcaggcaagattatggccattgatccgctcggaaaaaaccgcgcgttatttgaagaaaaacagctggcgggtgacgggatactgacagacttcacctcgttttttgaggttgccggacattctgtttgagagatgcagttgggaggaaccaccaaataaacagcccgccagtaatcgggcaattcttcttgttacaatgaccacaggtcttgagaaagaatttgatctttcaatggaagagattaaagattttatcagatggtatgatcaaaaaagttctggaataggcttatctagatatgttatcgagaagcactataataatatagggccttttcaaaatagaagggaccatattgtttttgggaacattcttacttttaatgtgaatgaatacactttagataaataaataattacctgtttccttctgcagccctctttttaaaaagagggctttttttatgaagtgcttattctttttcagttgcgcttttgtttttgtataatgattttctcattgaaggcggcattttttggatcagaaaggtgttcgccttaattgagatattggctgaatttatagattcgcagagataaaggaagtcgtaaaagatatgccgtttgcggatttcagcctgtcttttgagaaggatcattcttcaatgacgcttatttcccccgtaccgaaaaaaagtgaaacacgttctcctcgcttttcataggttttgataagtccttcctgccctataagtttccagcctttttcggctatttccaattggtataaaccgctcggaccttcttcttcttttgcgaaacggtatgtatagtttgaaacgtattttcctttttcatattcctttgttttgctgtgcacagcaaataatggaaccgggaaatccgggtgagaaacagatgctttatatcctcccaaaataaataagctaaataacaataatataaaaaaccacagaatatatttcataaaacctccttatgtcaattagtcggtgcattttaaaaaaagatacaccgcatgattggggtgtaaaagcgggtaagaagataaggaaaggagagagacggatggaacttgattttgtgattcgtctggcagttgcgggtctgctcggggctcttattggattggagagagaattcagggcgaaggaagccggtttgaggacgcattttttagtggccgtcggcagcgccttgatgatgatcgtttccaaatacggcttttttgatttgttatccaacagccatacgtcctttgatccgagccgggtggcggcgcaggtcgtcagcggcgtcggatttttaggagccggcacgattattttgcagcggcatgtcgtgcgggggcttacgacggccgcggggatttgggctacgtcagggatcgggctgacaatcggggcaggtatgtatgtcatcggcatcagcggcacgattttggcgttaatcgggcttgaactgttaaattttctgtttaaaccggcggcgcattctttgtctgtcagtttcaggattgaggagaaagccgtcatgcatgatattttaacttctcttgaggaaaaaggaattcttattacgtcctatgaattgaataaggcggtgcttgaagtgaagggaagggtgaaaagcaaaagcgggaaagcggcggtaatggaaaaagttcaagccctcccgtatatcctgtcggtcaaagttgaatagcagacaggggaagcctcctgtctgcagtcatttcttttcaaacattaataccaaggatagaacgggatatacggccgcggatagtatggatatggtctaggataataataaggcggccgcggatagtagggatatggtctggggaaataataaggcggccgcggataatgatatggcacccgttcgtggctctcggctgtgtattcatgatagaaaggatcgtacaagaggaaaacctccttttcaaatgtttggttccgtttaccttattcctgtatgcccggtatggtgtacgtacaacgggcaaaaaaaagacgccggttatcatccggcatctttttttacactttcacatcaattgaatgtccggcagtcgggtgctgggacggcagcattttcactgtttcttccgccgcagcctgtgcttgctgcatgaccgtttttgttaaagcgatatttacattctgcgccagagatgcctgatgcattgcgattgataacgcagggatatccatagcttccacctccttatcccttcatatcggcggcatgctctgattatgaaggagactggcggtttctttttacggcccattctaaaaatgcggcagcgcataccccgagggtataggcgaaaatgtcactccagacaaattgccagccgaggatcagcccgccgagcgtgctgcttctgattgcgtcaatccaaggcgcgtgatacagctggctgcattcaatcagacagcaaaacgagaggctcaaaaatgcggctgtttccgtccgtatgtgccgaaacaaaagcccgaatcctgtaaaaatcattgccgcccacaaggcatctcctaaataagcgtttatgatgccgggcaatagggcggtgatgtatgcagttctggacagcaaaccgagggcgatgataaaaacggtacatattccgtatgtcaatggatgtctattcacttcacactgttcccctttttttgtactcccatgtattgtaaggaacgacggagaagctgtctatgaaaaaaacggcccgggaggccgctttttttgcgttatctggcttttaggttgacatggtctgctttttggtcactgccgatgacgaagcggagctcatactgccccgtatggtagacgtaatctgtttcgcccgtttttggcactgtcaggattttgtcagcgctgccgatttgtttgcttaagacgtcaggtgtgacgctcccgaggtttaagcgccgctcgacccctgttccgaaatagcgtatttccgagatttttccgtttttatgataggaaaatccataaccggggtttcccatgttccagctgtataaatcaaatggattgcggctgtctgctttttgttccggctcgccgattttatcgtaaacgtcctgtcttgtgctttggttgattttcaggcctttcacattttgcggcatttcccctttaaacgccgattggtaaaggctgttcaccagttcttgtgcacgttggttttccgtttttgaagcggctgcggcgtggacgggctgtgtaaccgaaaatgcttctgcgccgaatgcgcatcccgtgagcatcactgccgataatcccgtggcgagtgtttttttcttcaacatatgtgaacgcctcctttttaccgctcatacccgtatgtttcctgagataaacgagatgttttagtgaaaggccggctgggaatcatagaggatgtatagaggggtacagaaaggggaaaagaaaatggctgggacaaagaaagttacaatcaatggggttgaaatggaagcgccggacggccaaaccgttttgcagcttttgaacaatagttcaattgacgtgccgcacgtgtgttatcacccgagtctcgggccgattgaaacgtgcgatacctgtatcgtcaatgttaacggggaactggtgcgttcgtgttccgcgcaaataaaggacggagatgtcatcgatacgctttcgtccgatgtaaaaaaagcgcagattatcggcatggacaacattttgcacaaccatgaattgtactgcacggtctgtgattacaacaatgggagctgcgaagtacataataccgtaaaggaaatgaaaatcaatcatcaaagcattccgttcgatcaaaaaccgtatcctaaagatgaatcaaatccgttttaccgatatgatcccgaccagtgcattttgtgcggacgctgcgtcgaagcctgtcaggacgtacaggtaaccgaaaccttaagcattgattgggagcggaaacgcccgcgggtcatttgggatcaggatgtgccgatcaatgaatcatcatgtgtttcctgcggacattgttcgacggtatgtccgtgtaatgccatgatggaaaaaggcatggaaggcgaagcggggtatttaacaggcattaaccaagagacgcttcgtccgatgattgacatcacaaaaggcgtcgaaaccggatacggatcgattttggccatatcggacatggaatcggccatgcgggatgaaagaatcaaaaaaacgaaaaccgtatgcacatactgcggtgtcggctgcagttttgatatatggacgaaaggaagagacattttaaaggtcgagcctcaggccgaggccccagcaaatggcatttcgacgtgtgtgaaagggaaattcggctgggatttcgtcaatagtgaaaagcgccttaccaaaccgcttatccgggaaggagactcgtttcgggaggcggaatgggatgaagcgctgcagctgatcgctgataaatttaccgatataaaagaacatttcggccctgacgcacttgcctttatcacatcttccaaatgcacgaatgaagaatcatacgtgatgcagaagcttgcaagagccgtcatcggcacaaataatgtcgacaactgctcacgctactgccagtctcccgccacggccggattgttcagaacggtcggatacggcggtgattcagggtcgattacagatatagaaaaagctgagctcgtgctgataatcggttcaaatacgtctgagtctcaccccgttctgtccacacgcattaaacgttctcataaactgcacggacagaagctcgtcgtcgctgacttgcgaaaacatgaaatggccgagcgctccgatgtgtttttccagccgcgtgccggatcagatattgtctggctgaatgccgtatcgaaatatctgcttgatcacgatttggcggatactgcatttctgaaggagagagtgaacggattagatgaattcgtgaaaagccttgaaccttatacaatggaatatgcggaaaaacataccggtgtggacaaggataccttaatcaaagtggcccggatgattcatgaagccggcagcgtgtgcgcactgtgggcgatgggtgtcacccagcatatcggaggaagtgatacgagcacggccatttccaatatgcttcttgtgaccggaaattacggaaagcccggcgcaggctcatatccgcttcggggccataataacgtgcagggagccagtgatttcggcagtatgcctgacagcttccccggctatgaaaaagtaacggatgaaaaagcccgtaaaaagtatgaacagggctggggaacagacctgccgaaagaaatcggaatgacaaatcatgaaatgatcgaaggcatccactcaggaaaactgaagtccatgtacttaaaaggagaagaaatggggcttgtcgactccaatattaaccatgttcatgccgcattcgaaaaacttgatttctttgttgtgcaggatatctttctttcgcgtacggccgagttcgccgatgtcgtgattccggcaagcccgagccttgaaaaagaagggacgtttacaaatacggaacggagggtgcagcgcctttacgaagtgtttgaaccgctgggcgattcaaagcctgattggcagatcattacggacatcgccaaccgtctgggcgctgattggcactatgaacatccggcagacattatggaagaagcggcgatgctttcgccgctctacgcaggcgtcacttacgaacgtctcgaaggctacaattcactgcaatggccggttgcagcggacggaaccgattcaccgcttttatttacggacaagttcccgttttcagacggcaaagcgattctatatcccgttcagtggaccgagccgaaagaatttgatgaagaatatgatatccatgtgaataacgggcggctgctcgagcattttcacgaagggaatctgacttaccgatcaaaaggaatatccgaaaaaacaccgagtgtgttccttgaggtctcgcccgaactcgccgaagaaagagggctggaagacggaacgcttgtccgtctgacatcaccgtacggaaatgtgaaagtcaaatgcgtcatcacagacagggtaaaaggcaaacaagtctatctcccgatgaacgattcaaaagacgctgccattaaccttttgacaagcagctatgccgataaggataccgatacaccggcttataaagaaacatcagcgaagatggagattttgaaaaaagaaggcgttaatccgcttccgaaaatcaatttccgttacggaaacccgcagccgcagatcggtgtccgggttgatcggaaatgggcgcgtaaagattatgtatttccgggagacgccgtaaaaagggggaaacagcaaaatggctaaagcaatcagcggcatccgaaaacagaccgtcacagaagacgacaaacgaaaaaaggacttagaagagatcgagacggctcttttacgaaataaagacgcgattttggaatctctgcacattcttcagcacatgaacgagcgcggcgttttggcgcttctgcgcgggctcttcggccagggagacaaagtgatggatatcctcgtgaagaaggcgaatactccggaaacggccaatatgctgaaaaatctcctgctgtttagcggcgttctcggcatgctcgatgtaaaacagcttgagccatttatcgttaaaatcaatgcgggggtcacaaaggccgtcgaggaaaaagacagcggcaggaagaccgggtattttgatatcgtccgcgctttaaaagacccggaaatcaacaaggccgtcactctgctgttttctttcctgaaaggcatgggcgctgatacggacgatatggaaaggaatacgcagcctcctgaagaccaaaagcagcaccagaaaccgcagacgaatgagtgaacatctctcccgagcctggccgaaggctcgggttttttgtgcgcttctcctgttttcttgggagaaatttcacctccggattcatgacttttgttgtgttatgttaatagttaaggttatgaatagaaaaaaattgaaaatatgtgctaggataaaattcaaggtacgtcaactattcaaatatgaaacaatcaggagtgatgaaacatgagtaagctgaggagcacgagacaagccatccaaagaaccctgatgaaaggaaaaaacggcctggacgtatacaacccttttccttggtacgaaaaaatgagacgggaaagccctatacactttgatgaagaaacgaaggtttggagtgtgtttttatacgatgatgtcaaaaaagtcatcagtgataaagagacgttctcaagcctcatgactgatgtgaaaagctcgattgcaaagtccatgctgaatatggacccgccgaagcatacccaaatcagatccgccgtcaatcgcgctttcactccccgcgtcttgcaggaatgggagccgagaattaaagacattaccgatcatctcctgaaacaggcaaagaacaaagggcggattgatatcgttaaagatctctcttaccctttgccggtcatggtgatttcagaattattaggcgttccgtccgaacgtatggatcagtttaaaaaatggtcggacattctcgtcagcatgccgaaagatgcgagtcctgaagcggcggagaaaaatcagcaggaacgtgaccaatgtgaggcggagctggcggcgttttttgcggaaataatagaaagcaaacgaaaacagcccggccaagacattatttctattttgataaaagaggaagaagagggagagaagctcacggcagaagatctgattccgttttgcaacctgcttttagtggcgggaaatgaaacaacgactaatctcatttcaaatgcggtttacagcatattagagacgcccggcctttatgacgaactgagacaggacccttctctcatcgcgcaaacggtggaagaaacgctgcgttttcgcgctcccgctccgtttgtcagaaggacggtccggcacgacattgaactgcgcggacgccgcttgaaaagcggggagatcgttctctgctacgttgcatctgccaaccgtgatgaaaacaaatttgagaaggcgggcgtatttgatattcatcgccaatcgaatccgcacctttccttcggattcggcgtacacttctgcttaggcgctccgcttgccagacttgaagcggaagtcgcgctgaaaggaattgtaaaagccttttcacaccttgagcccgttcggattgagccgatccgaaacagtgtcatgtacgggctggagtctttagaagcggagataaacgaaaatgagggagaagaaaaatgatgagaaaaacacacatcgccattattaatgtggccgctcacggtcatgtcaatcccacgctgcccgtagccgaggaacttgtcaatcgcgggtataaagtgacattcgctacgactgaggaattcgaagcttccgttgccaaaacgggcgccattcccgttttataccgcacaagcataaaggcggacccggagacgataaaagaacgggtaaataaaaatgatgcgtttgtgatgtttctggaagaagcggttgaagtgcttccgcagctggaagagctgtacaaagacgaccttcctgacatcgtcctgtttgattttttagctcttgccggaaaattgtttgcggataatggcggcatcccggccgtaaagttctgcccgagctatgcaatgaatgagtattttcaattaggaagagacgaagaaacactggaagcggccaaacaggcgatagaagaataccaggagcagattgaaaatgaacaattgaaacggatgacaatggaagaattttttatgcctgaaaaactgaatattgtctttatgccaagggcctttcagccgaaacaggaaacctttgatgaacgtttctgttttgtgggtccgtctcttggagaacgcacaaatacgggaagtctggaaattgatgcagccgatgaccgtccgcttatgctcatctcactgggaacggcgtttaacgcctggcctgaattttaccagatgtgtattgacgcgtttcgggactcggactggcgggttattatgtcagtcggcacaacaattgatccggaaagtttttcggatgtccccgatcactttatcatccgccagcacgttcctcagcttgatgtgctggagaaagcaaagctgttcgtatctcacggcgggatgaacagtacaatggaagcgatgaatgcgggtgtcccgctcgttgtcgttccgcaaatgcacgaacaagaggtcaccgcaaagcgtgtggatgaattggggcttggcgtgcatctgccgccgaaagaagtcactgtggcccgtttgcaaaaagacgttcagaacgtatacggcgataaaaacatcctcagccgcgtgaaaagcatgcagcagaaaatagaagaaaccggcggtccaaaacaggctgtttgcgccattgaagaatttttgaaaacggcggccgtcgaaaattgattgagaaacaggcagcgcaccggaagacggctgcctgttttgttatatgtttttcttcatgccgcatctccggcattccctcaaaaattttccgcccttcactgagcttttaaacagcgtgtagtcgcaattgtcacatcgaccgctgtgaacatcaggatattcattgaactcataaatgaccgaagtatcgtatccttttgtctcgaactctttttttgtttccataattgaaagtccctccgcgaatcaaatcattctgcccggttaatgatacagcaactgcacgggggattcaacgggagcatagcttgattttcccggctgattgcgtaacaataatagaaataaatgacggcctgccatagggcgcccggcatctgaagggaagaagaaaacagcgatgggaaaaggattgaacgggaaacggattgccatcggcggttcgcggaaaacagaagagatcacaagattaatagaaaagcagggcggaacggcggtcgtccgttccctccaaggaaccgtatacctggcggaggatcaaattgaacccgacgtaagaacatttgccgggcaaaaagccgactgggtgatattcaccacaggcatcggtacggaaacgttattgtcggtatcggaaaaaatcggtctgaaagaagaatttttagcggccgttcatgaagcgaaaatcggctgcagaggctataaaacatatgcggccttaaaaaagctcggcatcacgccgcatgcctcagatgaagacggtacaacaagagggctgatccgctccttggaacgatttgactttaaagataaaaaagtcatgatacagcttcatggcgaaaaagcgccggtcttaacggagttccttgagaaaaacggagcggaggtattccctgttctgccgtatcagcatattccgcctgaaagaaagacggtcgataaactgctgggagagctgttaaacggagaggtcgatgccgtatgttttacgacagccattcaagtgcgttctctctttgattatgcaaaagaaaaagggttcacaaaagaattgcagcaggcattcgaaaaacaagtgcttgccgccgcagtcggcaaagtgacggctgaagcgatccgggatgaaggggtaaagagggtccttgctccggacattgagcggatgggagcgatgattattgaattatcccgttactatgaatctctgaccttgtcataaaccatcattcagcagggaaaaaagcctacgcttccctgctgaatttttttaattgccaatgttccgtgaaaagggaaggatatgtcaaggcgctgagtatgatacatgtaagaagagcggaggccatcgttgtaaaaacgatcagcagctgaaagcgcaccgcctgtatcggatcagcccccgctaaaatctgccccgtcatcatgccgggaagctgaacgagacccaatgttttctggctttcaagcgtcgggatcatactgagcttcatgctggacgtcaatatctgccggacggcctgcttaggcgttcctccgagagagagaatcagttggatctcttctttccgcagatccgcttccgaactgagcttgtttaaaaacaggcttgagagcaccatggagtttccgatgaccatgccgcttatcggaatgacatatcttgaagtgaacggaatgatgtgaagggtcagtaaaagtccctgcgtcacaacttccacgatcgccagtgtcagaaaaacgcgccaaaatgagccgatccgcatttttttccgtttggcgacattgtgcgaagcggccgtgagcatgagaagcaccattaatatgataaatatcgggtgatcaccgcgaaaaatcagcgacagcacatagccgatgatgagaagctgaatgacggccctgacggttgcgacgatcatatccttttcgacgccggctttaaaagatttagacaggaataaagcaataatgacaaatatacttgtcaataatagagaaagatcattcatatcagcacccgctcccttgtaaaagcgcccgggccttttcgtgtttcggttccttaaagaacgttttcgtttccgcggtctctaaaagccgaccctcagccataaaccataccgtatcggataatcgttccgcttgttcaaggttatgggtgatccacaggaccgtcagctgtttttgccgatggagtttcgtaatcagtttctcaatgatgagaacagatgacgggtccagcgccgaggtgatttcatccagcagcaggatggacggcagtccggcgagagttcgcgctaatgagagcttctgccgctgccctccggataattcttttgcatttcgatccagaagcccgcgcggaaggtctgtaaaatctgcgagctcttcaggcgtatagtgctgtgctccgtggagtttttctgcgagcagaaggttgtcccgcaccgttccctcgagggcgggagctgattgaaatgcaaggcccgcggtttttctgagctccctgatatcccagcgccttatttcttttccgaatacaagcacttccccttcatcaggtgtattcatcagattgcacagtgacagcaatgtgctttttcccgcgccggaagggcctatcaacgccgtgatagaacctttttgaatatgtccggttacacggcttaggacatcaaaggacgtattgttttgttcaaagcgtttgccggctgacagaaaagatattgccggaatttcttctttcatacaggaggacacctttcgtaaaaaaatcaggaaccggtgagattggctgacgtttgctcagccgttttctggtctgtctgccgggaagcgaatgtatgcatgaccattcccgcaataataatgaacagtccggcaaatgaaagaagtgacggaaacgccgcggataaaaagacgatttcgccgatcagtgcaaaaagaacctctccggactgcgtcgcttcaacagcagcgagcttctgcggctcattcctcaccatatcggtggcgcggaaaaataatactgttgcgataacgccagagctgagtgcgacgataaaggattggaatgtctgtcccattgacggaagcccgtctctatgccagccgaaagcggcgatcaaaagccaaaacggaaggcttgcgagagtcatgccgagcacccgctgaaacgtatcgagttttccgccgtattgttccagcattttgcggttgccgagcggataggcaaatgcggcgatgacgaccggcaccacgctgaatagtatcgtgcggccggacagagaacccgcatgctgaagctgaatcagaccggctccgatcaggatgatgacggaagtaaccagcgaaatgagcgggatcttttgtctggcggaaaccgggcccgccggtgaattttttgtttcgtaaaaaaacggcgacagaagcacacccgcgacaattgtaatctgccacgtgccggcgatcagccagcccggcccatatgccgccgcaaacgtaatcggggcataaaaaagcacgaacccggtaaaactccacttcagccaaaaaaacggtttttttcggatttcatgccagagcggcgcccattttcctttcacataaacgatcaaaaataaaaacggaaccataaaaagaaaacgcagggaagagctccacatccagcttccgccggaaagctccatcgccctgtttaaaataaatgtgactgcaaaaaacagagatgccaatattccgatcacgatggctttcattaaatccctcattttgacacatatttttttatactatactattcaccggcaggcttcgcaatggaatatgagaaaatagcgttttaacaaatgatgaatgggaaacagacatatacggaggtgaaaacaatgcagaaagaggatattcaagtgctttattttgaagatgacggccgcattccgaataacccgaatcttccgcttgttatttataaagcggtatttaatgaagaaacggtgcagaaagcagagtccgtcctccgccggcacgattggtcgaacagctggacgggcggagtatttccgtatcaccattttcacagcaccacgcacgaagttcttgtcgcggtaaaaggaaacgcggttttgaggttcggcggggaacaaggagcggacgccgttcttcaaatgggagacgcagcggtcattccggccggcaccggacataaaaaactgtcgggcagttctgattttaccgtgatcggggcttatccgggcggccggcagtacgatacaaaaacggagaaaaatgatagaacttcagaagaaatcagccgtgtcccgctcccggaatgcgacccctttacgggaaaaacgggcccgctattaaaattgtgggagaaatgacaggggaaaagcggatggtctgtaaaaaaatagcctaaaagaaacgttattacacccccgccatataaataatttcataaacgaaacaattcacgttcaaattttgttcaaaaagtgttattatataagagtaaatcaaattggggttttttatgtttgctattttcagagaggaaaaagaaattttgacttattcaattgtttttgttgatataaaaataatactggatatggcaaagtgaaaaactgggtagtaaacatttatttttgtaaatgattgtgcatgaattcacaatcttgctttttcatgcttttctgcatgaagggggaaaggctaccctttccaaaaaaatcagcatactgcttatagtaaaggagaatcggatatgccagaaacaatcgatcaaacaaatgcatctgtcagccaaggccaacgcgatcttattgatcagctgctaaaacctgaagttcaagaatcactgactgttttagtggatcagcttccaaaactgactgagttagtaaatattttaacgaagtcttatgattttgcacagtctgtagcgacagacgaagtattgaagagcgatacagtgggtgcgcttacagaaattcttgagccggtgaaagaaacagcgaaagaagtggcggctactgcgatcgaagcaaaagaccgcgcggatgcaagcaatgaaacgatcggacttttcggcctgctgcgcatgctgaaagatcctcaagctcaaaagctgttccgttttgctaacagctatcttgaaatcatgaacgaaaaacaaaaataatctcagattcaaattgatataaaggacggaggatatacgatgtcaaaacatattgtcattttaggcgctggttacggcggagttctttctgctttaaccgttcgcaaacattacagtaaagatgaagcacgcgtaaccgttgtgaacaaatacccgactcaccaaatcattacggaactgcaccgccttgcagcgggcaacgtgtctgaacaggctgttgctatgccgcttgaaaaacttctgaaaggaaaagacgtcgacattaaaatcgcagaagtcaattctttctcagttgataagaaagaagttgccctttctgacggttctaagctgacttatgacgcgcttgttgtcggacttggttctgttacggcttatttcggcattcctggactcgaagaaaacagcatggtgctgaaatctgctgctgatgccaacaaagtatacaaacacgtggaagaccgtgtgcgtgaatacgctaaaacgaaaaacgaagctgatgcaacgatccttatcggcggcggcggcttaacaggcgtcgagcttgtcggtgagcttgctgacatcatgccgaaccttacgaaaaaatacggcgtagatccgaaagcaatcaaactgaaattagtagaagcaggtccgaaaattcttcctgttcttcctgatgaccttatcgaacgcgcgacaaaaagtcttgaaaaacgcggcgttgagttcttaacaggtcttcctgttacaaatgttgaaggaaacgttattgatctgaaagacggttcaaaagtcgttgccaacacatttgtatggacaggcggcgtacaaggcaacccgttagtcggcgaatccggccttgaagtgaaccgcggacgtgcgacggttaacgatttcttacaatctacttctcacgaagatgtattcgttgtcggtgacagcgctgtatactttgcgccggacggccgtccgtacccgccgacagcgcaaatcgcttggcagatgggtgaacttgtgggttacaacctgttcgcttacttagaaggaaaaacgcttgaaacattcaagcctgtaaactctggtacgcttgcaagcctcggacgtaaagacgcggttgccatcatcggagcgaactctactccgctgaaaggtcttccggcatctttaatgaaagaagcaagtaacgtacgttatttaacacatatcaaaggattattcagcctcgcttactaatccttaagatcacacagaagacattgccggactttctcggcagtgtctttttttttgtatgaaaatgttaacggatacaattttctgaaaaataaaataaaaatgattgatatgtgagaaagaggaagctaaaataaaaaagaatcattttgttaacgttaacatttttaagagggaggatgaaaatgtgaaagcttttatgggtgatgattttttactggatagtaaaacggccgtaaagctgtacagggaatacgccgaaaacatgccgatcattgattatcactgtcacttaagcccaaaggaaatctatgaaaataaaaccttcgcaacgattacggaggcatggctttacggtgaccactacaagtggcggatcatgagggccaacggcattgaagagcgctgcattaccggaaacgcttcagatgaagagaagtttttcgcctgggcaaaaacggtgccgatggcgataggcaatccgctgtacagctggacgcatttagagctgcagcgctggttcggcatttatgacgtattgaatgaaaaaacggccgcggcaatttggaaaaaaacgaatgagctcctgcagggagacgggtttggcgcaagggatctcattctgaaatcaaaagtcaaagtcatttgcacaaccgacgatcctgccgatgcgctgacataccacgaactgttgaaagaaagtgattttccggttcaagtgctgcccggatttcggcctgacaaaggactggacatcagcagcccgggttttgccgattgggtccgttcgctggagagcgcttccggaatggctgtcaccacctaccaatcgtatttagatgcgttagaatcccgcgtccgcttttttcacaatgccggaggaagagtgtcggatcatgcgttagatcaaatggtttatgccgagacgaccgaagaggaagcggcccggatttttgcagccggattaagcggagagcatgtatcttttgaagatgaaaagaaattcaaaacacggacgctgcaacatctttgcggtctttacgccgaactggactgggcgatgcagttccatattaacgcgttaagaaataccaatacaaataagttcagcagccttggtcctgatacgggatatgactcaattaatgatgaacgtatcgcaaaaccgcttgcccggctgttagattccgccgaaaaaaagcggcaattgcctaaaacgattttgtattctttgaatccgaatgacaactatattatcgccagcatgatcaacagctttcaggatgggaaaacaccggggaaaattcaattcggcacagcctggtggttcaatgacacgaaagatggaatgcttcagcaaatgaaagcgttatcaaacatgggcctgttcagccgttttatcgggatgctgacggattcaagaagtttcctgtcctatccccgccatgaatacttcaggcggcttgtctgcacgctgatcggcggctgggcggaacaaggcgaagcgccttacgatatggagcttttaggaaagattgtcgaggggatttgttaccggaatgctgaggaatatttccgcttttaaaaaatggaatgaaagaggtggcctatgagtaatgtgcctgtcgtgacagcacctgccgcaaaagtgaaggagcataagctgagtctgaaagaaaaagtatcctatggttttggagattttgggaacggatttatgtttgatctcgggcagatctatttgctgaagtttttcacagatgtcgcaggcattccggcagcgttcgccggcagtatttttttggtcagcaagctgtttgcggctttgactgatccgattgtcggctcggccattgactacagaaaaaagatcggaccccgggggaaattcaggccgtacttattattcggaagtattattcttgcggtcatgaccgtattgatttttgtgtcaccggacgtgagcgtcacctggaagcttgtgtacgcctatgcttcttacatgctgtggggggtcgcttattctttcgtcaatattccgtacggctccctcggcgcggccattacacaggatgcggaggacagaacggcgctttccgcattccgccagataggctccctcggcgcgctgctcattacaagtgtcatcgtcatcccgattcttgttcattttgataacgttcacatcggctacccggcagtcatgggaatgatggccgtaatcggaatcgcgggatttatgatctgctaccgaaactgcaaagaaagaattatcgtccgtgaagcgccgaaagaaaagctgtccgtcatgtcggttttcaaatgctttatcggcaacaaaccgcttctgaccgtcgttttcatgacgattttctcaatatcggcatataacattaaatccgctatgcttgtttacttcgcccagtacaatctcaacaatgcggagctgatgtcctacatgagttttatcatcatcggttcttcatttttaggtgttttgtttatgccgaaactcgtcaaacgtttcggaaaaaagcaaacggtgatgatcggttttgccgtcagcgccgcggctgatgcgctgaatttctgtctgccgtcaaatgtatatatctttacggcgttagcgagcattgcttttatcgggatcagcataccaaacggcattacgtgggcgcttgtgtcggacattattgattacggggaatggaagacgggtgaacggaaggaggcgacgacatattcgcttttcaacttctccagaaaactcgcccaatctttatcaggttttctttcaggcatcgggctgagcgttatcggctatatcccgaatgcatctcagacaaaaggcacgttaatcgggattaaagggcttctgctgctgtacccggctttcgctttagcgtgcgccatgctgattatcggtttaatgtataaactgacggaccggcagcatgccgagctcgttcaggacttacatcatgcaaaaccttaactttagtgattttatggactgtccgttaatggtacaatagaaataaatgacagcatacagaaagaaaggaaaaacgatggtaaccataaaagatatcgcaaaactcgccaacgtatcccacacaaccgtatcccgggcacttaacggcagcccctacattaaagagcatacaaaacagaaaatattagagctcgcttcacagctgaattacacaccgaatgtaaatgcaaaaagccttgccatgcaaaagtcccatacgatcgggctgttttttacaagcatcacaaacggaacctcacacagctttttttccgataccatcaaaggtgtaaaccgcacaatcagtgaggaatacaatttgttcgtccgcgcgattgacgacctgaaaagctttgaaaccattacgcccatgagatatgacggaatcattttaatgagccaaagcgacagtgataattcatttatttatcatatccgcgagaaaaacatcccgcttgtcgtgctgaaccgggacattgatgaccggagcatcacgaatatcctgtcaaacgataaagaaggctccagacaggcggtcgactgcctgatcgcaaacggacacagagatatcgcgatcattgagggaaaggaaggattcaggtcaacttctcagcggaaagaaggctatttgacatctttaattgatcattctatcccgattaagcatgaatacagtgtaaaaggccgctatgatatggaaagcggcagtcaggcgatggaaaaactcttggcgcttcaatcaccgcctacggctgttttttgttcaaacgatgatatggcgatcggggcgatgaatgccattttcgccaaaggcctgaacgttccggaagatatatctgttatcgggtttgatgacatcggcatttcccaatacatgacgccgaggctttcgacagtaaaacgcccggttgaaaacatcagcatactcggcgcagagaagattttggcgctaatcgccgacccggatacggcggcggaaaaaatatatgaaaacaccgaggtgatgataagagattccattaaaaaactcacataacggcccgtctgaatatccgggttttcacacggagaaatgttaacgtgtgcataaatacagaaggaggcggacagcttgcagcagctgaataaaaagatgtgcggcgaatacattcaatgtcctgaaaaagtccttcagttcggtgaaggcaactttttgcgggctttcgctgactggcagatcgatcaattgaatcaattgacggattttaacggaagcgttgtcgccgtacagccgagaggctctgagaaaataaaacgtttaaacgagcaggacggtttatttacgctttttttgcaggggataaaggacggaaaaccggctgaagaacacatgatcgtcaaatccatcagccgcggcattgatcttttttctgactatgattcctttaaacggctggcagcacaagaggagcttcgttttatcatttccaatacgacagaagcgggaattacgtttgagaaaggcgaccggcttgaggatagacctcaaaaaacattccccgggaaattagcggcgttcctttatttccgctataaggcatttgcgggtgacgccgagaaagggtgtattgtgcttccatgtgaactggtcgaagaaaacggacggaaactgaaggcggccgtgcttcaatatgccgggctgtgggagctggaacctggttttactcaatggattcatgacgcgaacatcttctgcaataccctcgtggatcggattgttcccggatttcctgttgataccgcggaagaacttaccgattttctcggatacgaagaccgtctgcttgtggttggtgagcattattatttgtgggtgatagaagggccggaacagcttcagaatgagcttccttttgctgaggccgggctgaacgcactgatcacgtctgaccttacgtcttacaggacaaaaaaggtgagaatcttaaacggcgctcacacggcattggcgccagtggctttactatacggactgcaaaccgtccgggaagcggctgagcacgaggtgacgggcagattcattgaagagctgatcaatgaagaaatcctccctgtgctgcaaatagagggtgtcacccaatacgcggcagatgtgttacagcggtttaaaaacccttatatccaccattatctgcaaagcattacccttaacgccgccgcgaaattcaaaacaagaaacctgccgacgctgaaggcttatatcgaacaggagggccggctacctgagaagctggtattttcgttcagcgccatgatctattcatactggaacggaccgaacaaaccggctgactgcgaggaggttcttaaccgttttcaaatggcgcggtcccgttgcaaagatgatatgtttcaagcggcatctgccatattaggagaagagcgattgtgggggaagaatctgaatcatcttccggggctgactgaacgaacggctttttttctgtctgtcattcatgagctgggtatgaagcaggcgatacatgaatgctgcggcaaaaagggggaagtgaaatgaaagaggtcataaaaatccataaaaacgataacgtgcttctcgccatgcgccattttaacaaaggggagcggctgcatacagacggactgacgattgaagtgaaggaccctgtaaagcgggggcataaaatcgcgctgcaaaccattgaagaaaacggcagcatcattaaatacggtttttcaatcgggcgtgcgacaaggcggatttcggccggcgagcatattcatacccataatctgcaaacgaatttatccgatgtgcaagaatacacgtattcaccgcgcttcgaggacaatccttttacaaatgagaaccggacatttaaaggctacagaagagaaaacggtacatccggcgtccggaatgaactgtggatcgtgcctacagtcggctgcgttaacggcgtcgctgagaaaatcctgcagcgcttcgtaaaagaggcgaaagacattgctccctttgacaatgtgctggttttaaagcaccaatacggctgctcccagcttggcgatgatcatgagaatacgaaacaaatgctgatgaacgccatccgtcatccaaatgcgggcggtgtgctggttttagggctcggctgtgaaaataatgagctggcggcgattagggaaacgctttctgaagtgaatggagatcgggtgaaatttctcgaatcacaagctgtcacagatgaaattgaagcgggtactgcgcttcttaaagagatacaccttgcggcaaagggagataaacgtgaggagattccgctgtcagaattgagcatcggattgaaatgcggcgggtcggacggtttttccggcatcaccgcaaaccctttattagggagattttcagattacttgattgcacagggagggagcacggtcttaacggaggtgcctgagatgttcggcgctgagacgattctcatgcagcgtgcggcgagtgaagaagtgtttcataaaacagtccgattgatcaatgatttcaagcaatattttatgaagcacgagcagccgatttatgaaaacccgtcaccagggaataaggaaggcggcatttcaacgctcgaagacaagtcgctcggctgcacccaaaaagccggtcttgcaccggtttctgatgtgctgacatacggtgaaacactgaaaacaaagggattgacactgctcagtgcgcccggcaatgatttaatcgcttcttcagcgctcgccgcggcgggctgtcacatcgttttgtttacaaccggaagaggcacgccgttcggcacatttgtcccgactgtgaaagtatcaacaaataccgatttatttcaatcaaagcctcattggattgattacgacgcgggcagattggcggaagaacaaacaacagaagatcacattgtaagagattttatacaatacattattaaagttgcaagcggagaatttgtcaataacgaaaaaaacgattttcgggagcttgcaatctttaagtccggtgtgacattataagggaaaaggcgatctgacaacagcgccttttttatattaattttattccgctgattaaaataatcgccgccatcacaaactgcagggggcgcggtgagaatttcggcgaaaagaagctgccgagaagcacacccggcacagagccgatcaacagattcaatacaagcaggtaatcgacgcttccgaagcttgcgtttaacagaccggcagccgttacgagcagaaaggcatgtgcgatatccgttcccaccacttctgccgttttcattctgaacaggtataacatggcgatcgcaaataatgagccggatccaatagatgtcaggccgacgatgaagccgaaaatgacgccgatcagtatcatgagtgtccgcttttcttcaagcgttttttgctgccagcggttcggccgcagttttttatcgaaaaaaaggcgggcgataatggaaatggctacaagggtcagcacgtagccgagcgcctgtttgataatctgctcctgatgctggtgaaaagcgggaaacaagtgaagaacaccgatggcggctgttgcgctgggaatgcttccgagcgccaagtagccgacaagtttaaattgaacggtgcgctgcttccaatgagaaacgacaccgaacagtttggtgatggagttatataaaaggtcagtgccgacggcgattgaggggttgatccccaaaacgatcagtaaaggagtcaaaagcgctgctcctcccacacccgtcaatccgacaagcgttccgacaaagaaacccataaacacaatgcttacagtcatctgtgtgcctcctgaataatcctactatttttatcagattatatatgattaagaggcggtaatcaattaaattttcggaaaattttatacagaacaaaaaatccgccagcctgctgttatgtcgcagaccggcggatggccggattatgatttttgctgataaaacggaagttccgtgtggcccatttctctgacatacacgaaaagattgcctttatgatgaatttcatgctccatggcaagctgaaggagagccgcgccggtcacttttctgccgaaagaggcggtcaggtcaatttcgcggttcagctgatcttctgtcagctgtgacaggatgtttgtcgttttttcagtacacgtttcagccagtttgacgaggtctgtttctgcttcttctttcggtttgttctggatggctgatccgtttccgtcgttaatgacgtttgcaaacataagaaaagaataaaccatgtgttttacaagttcctgagcggacattgatgtctctgccggcttgtaatcgtaatgttcgcggctgattttttccgccagctcaatcgtcacgtttcgatgtgacagaaagtggctgaccaattgattttgtgctgtcatgtgaaaacccccatttaatacagaataaaaagctgcaaggatatgctatatcaacggcacggaagaaacaagcaataagcttgtgacggagataaatcgttgcggatatccgaaattcgacaattgcggtctttttgcgttcttctttttctagcaaatatgataaaatatgacatatctcggtcattccaaaaggggggatttattgaggatgaagcagactattccgtcctcttttgtcgggctcaaaattaatgaatggtatacccatatccggcagtttcacgttcttgaggcggagcgcgtcaaacgtgaagtagagagagagatcgaggatatggaagaagatcaggatctgctgctgtattattcattaatggaattcagacaccgtgtcatgctggattacatcaagcccttaaaagaggacccttctcagcctgagttttcagaattattggaagacattgaaggcaaccagtataaactgacaggactgcttgattactactttaatttttttcgaggaatgtacgaatttaaacagaaaatgttcctaaacgccatgatgtattacaaacgggctgaaaaaaaccttgcactcgtttctgatgacatcgagaaagctgagtttgcttttaaaatggccgagatattttacaacctgaaacaaacctacgtctccatgagttatgccgttcaagcccttgaaacgtaccaatcgtatgagacgtacaacgtccgcagaatccaatgtgaattcgttattgcagggaattatgatgacatgcagtatccagaaagagcattgccccacttagaacttgctttagatcttgcaaaacaagaaggcaatccccgtcttatcagttcagccttatataatctcggaaactgttacgaaaaaatgggagacctctctaaagcagccgaatattttgagacatccgtttccatttgcaggtcagaaaagttcgataatcttccgcattctatttactcattaacacaggttctttataaacagaacactacagccgaagcagagaagcaataccgtctcgggctcagtatcgcccgcgaatacaatgatgaattgtttgtgaatctgttccaatttttacatgcgttatacggcaaggaaatggataacgcatccgtcaggcacacgtttgattttctggaagaacacatgctgtatccgtatgtggaagaattggcgcatgacgctgccaaattttacatgaaacacggacagcctgaaaaagcgctcacgttttatgaaaaaatggtgcacgcccaaaaacaaatccagagaggagattgtctatatgaaatctaaactgttgtcaggattgctgcttgttgctgtcgggttcagctttacacaggtaatcggccatgaaagccatttggaaaaccaagcggacggcacattccatattgccgcgcgcaaccaaacataacataaagacccttctgtggaagggtcttattttttgcatgcgtatccattccatttttatccgaatgcagggtctatatgctcaagttatctgtcctacgaatgccacctattgatgaaaaaggcataaggagagatgaagagtggggattgaagtgaaaaaacggctcgtatcggctgataaatatgcgttaaaatgtccgaatccgatgacgccggagtatattaccattcataacacggcaaacgacgcatccgccgctaatgaaatcagctatatgacgggaaacagcgaatcaacgagctatcattttgcggttgatgacaaagaagtgatccagggaattccgttggaccggaatgcctggcattcgggagacggcacgaatggtaccggaaaccgaaagtcgattgctatagaaatctgttacagcaagtcaggcggcgaacggtacagagccgcagaagaactggcgattgcgttcgcggcgcagcttttgaaagaacggggctgggggattgacagaatcagaaagcatcaggactggaacggaaagtactgcccgcaccgcattttgtctgaaggccgctgggatgaagtgaaggcgaagattgaaaagaaattaagcgggagtatgccggcgaaaaaagcctctattgcttcttccgcgtctgaataccatgtgaaaaaaggcgacaccttatcggaaatcgcagcatcgcacggtgtcagcgtaaaatcgctgcaaagcatcaaccatatcacagatccgaatcacattacagtcggacaagtgatcaagctcgctcagacgggttcttcttcaaaaagtcaggctgtgtcttcctatccgcttccatcaggtgtgatcaaagtgacgaaaccgctgacgaaagggacaaacgtaaaacaagtgcaaaacgctttatccgctctttatttttatcctgataaaggagcaaaaaatcatggggcggacggcgtttacggtccgaaaacggcaaatgccgtaaaacgttttcaatccgtcagcgggttaacggcagacggaatttacggcccgaaaacgaaggcgaaaattgaagaaaaactgtaatcaataaaacggaagctctccgggcttccgtttcttcttacatacaaactgcggcaagggccttttgaatatcataaatgctttcatcttttttaaactgctttgagacagcgggaagttccgcgcctgaaatccaaattttcagctctgaatcaaggtcaaagcggccggcggtttctacgctgaatctggaaatgctcttgtacggaatggattgaatctccgttttcttccctgtgagtccctgtttatcaacaagaataagacgcttatccgtaaagacaatgatatctcggacaagcttaaatgcggcgttgacattctcaccttccagcagaatacgagccagttctgcttttgcttcagccgtcgatattgtcgacgcattgcccagcaatccattgatgaaccccatgatatatcccccctgatacgtattctatcaaatcatactataaaaaggtttccaattcccagatgagtagagtaaactggtgctgactggaaaaggagagcatgttacacatgaaagatagatatgataatttcgcagccctttctgctgctgaatcggaatacagaattatttatgaagaaaaagagggaagtaaatgtatcgtcctcgctccccacggcggcaggattgagccgggtgtcagtgagctggtgcgggcattttctgaccaaagctcaatttatttatttgaaggaacgaagcggtgcgataaccgttctctccatttgacaagcacacgctttgacgaacccctggctttagaaaaagtgaccgcccatcattacggattggcttttcatgggtatcatgatctgaaaaaggcaaatacactcgtcgggggcgcggatctggaaaaagcaagactgatttgtgatctgctgtgtgaagcgggatttgatgccgagctgacagagaagaatgatcggctggcaggtgtaaatcccggcaacattgtcaatcggacaaaaaggaaaatggggctgcaattggaagtgagcacggcgcagagacacgcgctgttcagcaattttggctgccggggagaaaaatatacgccaaccgatctgttttttcggtatgtagaagccgtgaaggccggtttttatgataaatgaacagggggcccgttcttacatttactggagctgctatgcggcgcaagaagtgcttggcgggcagcacggtgagaacagcgtcatgatgcaaaaacctttcctccgatgtgaaaatgatgacattctgccagcggagtatcgctaattttcaataaaatacggcgttttttcttcagcggcatgtaagtgtgtctgtccgctttcataatacacattcggccgcttgtcggataacagacaagcgagccgcttctgaaattgaatacctgctttacgccgttcaaacagctccagccttttttccgcaaatgatgccgtcacccggaaagcggctgcgattaaaataacggcgtggctccttcgctggggaagctccatgtttaacagcataaaggtcggcacacagaagtggtacataaaatggttggcctgaaattcctgcagttctctgaacagcttgttcatatgaaaatggttgccggtatgcttcagcacatggcacagttcgtgcgcaaaatcctgccattgctcttcgggtgactttctttgattcaggacgatgctgtacatgccgtcccgcttcagcatcatactgtgcgtatcttcaaaatgaatccaaatgtcaagctccttggcaatcatctgcatatcaatatggagaggggcggtcattcccatgcggcaatataagtttttgacgtattcctcaagatgtgttaaaaaatcgcccaattgaatacaccctttcgaacatatgttcttttttaagcgagaaagaaaagccctgatcggactttgaatcaattcccttttcttttaaaaataaacattcagcttttatatcggctgaacgttaagcagtttaaaggaaaagagcggattatttatgtttcggcctgcggtttttctctttttcttttaaataattaatgaattcaatggcctgctgcttgctttccggagaaaagtcctgcatgtcccgatatgcgatctgcaggtcgggatcggcaaacatgtcttcatctgaaggttcttttccggttaacaaataatcagtcgacactttgaaataatccgcaagcttttgcagcgtgtcgtaatcgggttcagatcggccgttttcataatgagaatatctggcgcgcgagacaccgatatgatttgcgacttcttcctgtgttttctttcctctgagactctttaatcttccgcctatcatccgaatgacctctcttttttcaacaccctaagttacttatgattatagatacaaaatgtatcaaaataaagggatgataaaaaaagtatcaaaaaggtcttgatgatacgaaaagtatcgtatataatcaacatcataaggatacgaaatgtatcaaaatacgataagaaattgatcaggagggtgagagatgaagccgataatcatccgtttcagcagcaatccggctgaccagagatgtttaggaaaagcaggcggttcgatatcttttaccgcttgcggacttccggtattccgatttgataaccgattgcagtatgaacgctatataggtctgaagaagaacggagacgtcccttatgagtcgtaaaagctacccgtttttcatctattccggattactgaattcagaacattatgacaaaataggatccgccatttggctgtttttatggttcatcagctcaacgacaaaggaacacgtaaaagacggcgtaaagtgggggatcgtcctcggtcataagcccttaaaagcaaaagaaatggccgacgtatttgccgtcagcgaaaaaaccgtcagacggtggcttgaggttttggaacagcatgaatatatcaaaaccgtccgcgccccttacggactcatcgtctccgtaaagcactcgaaaagattcacgccgaaaaagacattgacccgcccggaagcaactgaccggacaatatcggcggatcaccgggacaaaaatgtccggagagaaatagatataacaaaaaatcatactgctgaagaagcgattaacgacattgccgcccattttatcagattaaggtctgtacaggaggggcggagcgtatacccgtcgccccgggattatcaggccatcgcccgtattgtttccctcggtgcgtcagcacaagaagcaatcaaatggctcggcgaatgctttaccgcttttgaacagcggcgcacctcttcagctgaaacgatcaaggctttcagctattgcgccaagtatatggaagaccgcttgaatgcacgaattgcgggaaggacaatcacaacaaaaaaagagaggaatacgatacatgacaaaacgaacgatcgagcagatactggccgacctgaaaaacggaaaacgtccattactggcggacagaccggaagaatcagacgaaagccgctttgactgtccgctctgtaaagatcagggcggttatctcaaaaaccagctgggaatggatgtgtgggttaagtgccgctgcgccgccgaacgaaaagcagagcgcatcctcagcgcaagtgagattacaggcgcctttcggaagctggacttcaaaggatttatcacgcggggcaagcctcaggcagtcgtcgacgcatatgagtgcgcccttgaatatgttgaaaacttcgacaagattaaaaactgccggaaaaacagcattgcccttttagggcgtccggggtcgggaaaaacccatcttttgaccgctctcagcaattatgtcatgagacagatgcagacacccgtgctgtattttccttttgtggagggctttacggatttaaaaaatgattttgatctgcttgatgaaaagcttggccgtatgaaacaggcggatgtgctttttattgacgatctgttcaaaccgctgaacggaaaaccccgggcgaccgattggcagattgaacaaatgtacgccgtcgtgaattaccgttatttaaatcataagccggttcttatctcgagcgagctggcctgtgacgggctggtgcaggttgatgaagccttgggcacaagaatttatgagatgtgcagcgattatttagtcatcattaatggcaattcatttgacgtaaaccacagattagagggggcgagataatgtgtaagctgtgcgggccgaagaaggtcattgtgacggaaacgggtttcggcgctgtctttcacccttgcccgaactgcaaaacaggcactgatttaacgccggtcattaaacgtcttgagcgaatggttcaagacgcaaaagcgaggcttgatgcacgtgtataaatatattaaatggcttttttgcctgctgttcagggcgaaacggatagaaaagcaaattgaagcatggcatgaggctgatggaaagtgaggataaccattgcaagaaaaacacagccccgctccatggcgggccgtacacagcggaaaagaaaaacccatttacatttattccgcttacagcgaagcggataaagagaagttcccttattcaaacggaaggctcatcgcggccgttttcaacttaagttcatactctcagcagatcaacgcggcattgatggcaaaagccccggaactttttgaggcggccgaaacggctctccgcctgctccggggagaaagttctgaagaaaaagaagcgttcataaatgagctcggaagcctcatacatgaagtaaacatcctgaaaaaaacggaggacgtaaaacatgaatcctaaaaaactgactgacattgaacatacaacattacaaagccagctggaagaaggcaaggtgcgggtcatcattgtagacggactgaagaaggaagcatggctcgccgaagcgccggagcacggcaaaacgcttgtcgaaacgcgaaaaggagatctggcccgggtcgaatatgaaatcggctttaaattgaattaatcgaaaaaaacagaatacgtccaagacggaaagcctgcggacactgatcaatcgcgtatatgctgcgcattggttggtgtcctttttttgttccgaaaaagaggaggatctgcatggaagacttactatttgaatataaacgcacgctgaaagagacgaaaaagtggtacaagcagctggaggaagccgatgaaacggtgcttacttcagaagaactgaaagataaaaaaatcatcagaacgatcattacagatgtggaatatgtcatcgaatggcttgaaaaaggccggcagcccggcataagaagggcgatagaccgaagagacgcttatcagagaatgctgattaaagatcctagaatcatagaaacctattcgcaggcgctgatgtttgaaccttccgcaaatgtgactgaagaagacagaatcagactgcgggacgcattagccgttttaacggatagagaaaaagaaatgctgctgctccacaaagcggaatgcttttcgtatgaacggatcgccgccttgctgaacgtaaagaaatcaaccgtacagacgacaatcaaacgggcgcttctgaaaattcaaaaacagcaggaacaaagaaatcaatcgcctgcttcataagttgtcatacgtttgccacctagaagtgaacagacgatcacaaaaagcggcctgattagaagccgctttttattatagacaatcatgtcggaggtggcggtgatgccgtagcatgaaaaacgcaaaaagaaaacaggcatttacaatctatcagtctcataaaggccgcatcacaaatcgcgcccttgccggcaaatcaggcgtatccgcaagaacgatcggcagatggaaaaaagaagggcgctgggacgaggcgcttcataagaacgcggaaagcggcggaaaaaacaacccgggcgaaggtgatgagttaaacgaacgccagcggctgttttgtctttattatgtgaaaagctttaacgccacccaatctgcgataaaagccggctattcaccggaaagcgcgcatgtgacgggaagcaggctgttaaaaaacgaaaaagtcgccaaagaaatcagccgcatgaaaaaggaaatggtcaataaagtgtttgtcgaagcgatggacgttcttcaagtctatgtgaaaatcgctttcgccgacattaccgattatgtaaccttcggaaaaaaagaggttcaggccttcggaaaatcagggccgctctttgacgaaaatgataagccgattatgcaggaaatcagctacgttgacgttaaagattcgcaccttctggacggaaccatcgtcacagaagcaaaactcggaaaagagggcattgcaataaagcttgccgacaagatgaaggctcttgaaaagctttccttgtactttgaccttttccccgatcaatttaaacaaaaaatcgaaaatgaaaaattaaagctggcacagcagaagatggaaaaaacagaagacagccaaaagccgattgacattgtcattacgcggaaagaggaacggtcatgattgaaaaagcggtcaacccgcgctttgaagattatttgttcaattggaatgaaacgtaccaatttctcgtcggaggctacggctcgtcaaaaagctatcataccgcgctgaaaatcatcctcaagctgcttcgtgaaaagcggacggcacttgtcgtgcgggaggttttcgatacgcacagagattctactttcgccttgtttgaagacattatcggggagcttgagctgggacatgccgtaaaggccgtatcttcgccgatgcagctgagattttcaaacggaagccggattatgtttaaagggatggacaacccggccaaattgaaatccattcatcatatttcactgatatggattgaagaatgctctgaagtgaagtatgaaggctttaaggagctgatcgggcgtctgcgccatcctgagctttcgcttcatatgatatgcaccacaaatccagtgggcacctccaattggacgtatcggcatttttttcgtgatgaccaaaaaaaacggtttgtattggatgatcagacgctgtatgaaaaaggcaccgtcgttaagggagatacgtattaccaccattccacagcgtgcgataatctgtttttgccgaaaagctatattaagcagctggacagcttacggcattacgatcctgatttgtaccggatcgcccgcaaaggacagttcggcgtcaatggcatccgcgtgtttccgcagtttcaggtcatggagcacaacgaagtaacggagcggattgcttccatcaggcgccccctgtttcggaccggcatggatttcggttttgaagagtcatacaatgcggtcatccggcttgccgtcgatccggatcaaaaagagctttatattttctgggagtattacaaaaacaaaatgaccgatgatcagacagctgaggagcttcaggaattggcggatcaaaaagagctgatcaaagcggattcggctgagccgaaaagcatccaatattttcgcaggcagggcttttgcatggttgcggccaaaaagtttccgggctcaagacttcagtatacaaaaaaactgaaacggttcaaacacatctattgctcagacagctgtcaacatacgatccgcgaattgcagaacttaacgtacgcaaaaaacaaaaacggcgttctgtcggaagatgagttttcaattgatccccacacactttcagccatttggtatgcgctggatgactatgacgcggcggatttgaaagatgcatcacaaaaacggagacgtccgaatcgggaaaggaggaggtaggcgttgccgaactatcaaaacgttagagccaccgtctttaaatcaaaaatggccgcgccgcaggcaaggcagatgaacgaagatcaatttgccgatctgtacggcgaagacatcatctcaccgccctataatctcattgaactgaaaacaatcgccgaatactcgacgattcttcagcagtgcattgacgcgtatcgggtcaatattacgggttttgggtttgatgtggaatatacctttgatgtaaatagcccggattgctccccgtcaaaaaaggcccgggccgaaaaaaactggatgaagctggagagcttttacaaatgtcttcattttgatgaatcggccgagacgatcctcggatatgcgatagaagaccgtgaaaaaacgggcaacggttttctcgaagtgcttcgggacggggcgggaaaaccggcggggattgaatatctggatgtgaaacatatgcgcgtgtgcggtgtgactgatcctgttgaagtcacattttcatatgaagaaaacggcgcatccaaaacgattaaaaggcaaaaacggttccgtaaatatgttcagatgctgaacggtcggaaagtgttttttaaggaatacggcgacccccgcatgatggacatgagaaccggcgaatacgtaaagaccctgtctgaagaataccgggcaaatgaagccattcacttaaaaatcggcagcggcacttatggaattccgcgctgggtcggcaatatcgtcaatctgtacggcgcccggaaagcggaagaactgaattttatgtatttcaagcagggccgtcatgtgccggccgccattacggttgaaaacggcatgctgtcagaaacctcgtacaaagagcttcaggattatatgaatgacctggaaggggtggaaaacgcccacaaatttctgctgattgaggcggaaggcattgcgaaggaaaaagaccttcacggaggcgaagacattacgcccgtgtctgtggaaattaaatcacttgcggaaattctgcaggatgatgcgctgtttcttgaatatgacgacaaaagcagaaataaactccgctccgctttccgtctcccgccgctttatacgggcgaggcgcaggaatacaacaaagccaccgccgatacggcacggaaaataacggaggagcaggtgtttcagccggagcggaaaacgctgattaataagctcaacacgttatttttgcctgaactgggtctccacgatgtacagctcacattaaaagggcctgattttcgcgatccgcttgaaattgcgaaggtgcttacgccatttatttccgccggcgcggtctctcctaatgacctccgtgatctggccggaagagtgctcggcaagacgcttgaggagtggcctgaagagtactacagccggccggtgctgaaagggaaaaaggagcaatcctgaaagggggtgaaaacatctcgtgccgagagaattgagaaatgccgtcatcagttttgtgagctatgtcgataaggcggcgaaccaaacggaattcttttttacaaaatcagccggaggccttccgtcatttgaaaaaaaggtgcaggtgtttacaaaaagcgaatcggatgagcagaagcttgtttacggcatcgtttacgagccggatgtcccggatgcccatggcgattatatgacggctgaagagattgaaaaggccgctcacggttttttggcggacgcccgcaacatcgatacaaatcataattttgaaggcggaaccggcgaggtggtggagtcgtacgtcgccccggatgactttgaaatcgggaatgctgtgatccggaaaggatcttgggtgcttgtcaccaaagcttccgatgaagtatgggatcagattaaagccggtatcattacgggctacagcatggcgggaaccgctgacgtttacgaagagccggcagaaaagcaagccggcttattcggcgcggtcaagcaatttctcgaccgtgaccgcaaatcaagaaaccgcaagggagaggacttgaacaagatgagaaaagaagacgttagagaatcgattgagcacgcgttgcacccgcttttaaagcggcttgacagcttggaccaaaacacggaagacaaagacggggcggctgcgccgtctgatgaagaaaagctgaaaacgcttgttgaggacatgctcgcgccgattattaaacgcattgaagcgcttgaaaaagtaagaggcgcatcaaagcagccggaagaagagacgggcggccaagagcctgttaaaaaatccatttggagcggactgctttaagcccagtcagaaggaggaactgtagagtgagaaatcaagatatcatcagaaaggcggaaatgtcactttccgctttaaaaagcggcggtttaatgaaccccgcacaagcttcagcatttatccgcatggtgcagaacacgccgaccattttcagcgaatcgcgtgtgattcaaatggaaaatgactcgcagaaatttgaaaaaatcggtttcggccagcggattctgcgtgccgctgaggaaggaaaagccttaactgacgatcagctgaccgtcccggcaacaagtacggtgcagctgaatacgaaagaagtcattgcggaaattaatatcacctatgacacgcttgaaaataatattgaaaaagacggcctgcagcagacgatcatgcagattttggcggagcgggcggcagtcgatattgaggagcttgtcgtaaacggcgatacatcttcttctgatccgtacttggcacagcttgacggaatccgtaagcagactgtatctcacgtcattgacggaaacggggaagagctgtccagagccacatttaaaaaaggcttaaaagccattccggcaaaatatttgcgcctgcctcaggaattcagattttacacatctcaaggcatggagattgaatggaaagaccgtgtggctgaccgtcagaccaatctgggggatcttgcggtgcagggcggtttgtcttcagcattcggcgttccggtcaaaggagtgtccaatctgcagccgtactcggtcggagaaggtgactcccagtacgatgcgtctgacatcattttgactcacccgaaaaatatcattctcggtttttcacggaatatccgaatcgaagtagataaagatattcgcagccgcaaatttattatcgtactgacggctaaacttgacagcaaatttgaagaagaagatgcaagcgccaaaatcgtaaacgttaaagaataagacgggggtggcagttatgttaattcagccgtctgacgttgtttcatattcagtttatgatcaagtcaaaaacaggccggagccgcttcttatacaggacattctggaggcggaggcggaagcggccagaatggcggggcattcgttcactgaccctatttactcaccgcttcccgaaaagattaagcttgcgttattaaagctttctcaatattttgcgctgatcaaccagaatgaagcagccgcttccgcctatcaatctgaaaagataggtgactattcctatacggtggcagatgaaggcggaatcagaaaaccggcggtgcaccatctgctctgtgaatatatcgcgccgggttattccccggtttctgcaaacgcaaaggtgagacctttatgagctacgaacggctgctcactgacagatgcgatatttatcatgagacggtgtcagttccgaaggccggacgcttcgggattcccgccgaaaagctccagcctgccttttcttatccggaagtgcccgatgctgaagacgtgccgtgtctgtttgttgaaaaacagcagcagcttattcagcttgcgcctgatcataaggtatatcagcggtttctcgttcattttccgaaagaggccgttgtgcgtgtcaatgacaaaatcatttgggaaggacaggcgtatattctggaaatgccgaagaaagcaagacagcaccattgggaggttatcgctgtgagagatgacagactatgaacataaaaaaccttgaacaatggaatcggtcgctgcaaaaggcatcatccggagaatttgcccgtcaggcaggcgaatggctggaacagtcaggagaggattttctcgacatggtacgggaggagcttattcattcgggaggaattgatacagaaaacctgctgtcttctttccgaaaaggagcgcaggatcatgtatggatcattgaaaacgggggactgacccttgaaatcggcaccaatatagagtatgcctcattcataaatgacggacattggaccgtctcagatgaaaatgtcagatgggtgcccgggtattttcaaggctcccggttcatctatgatccgtcagcttcaacgggaatggcgctcaaaaaacagtggatcagcgggaatgggttttgggacaaagcccttcttttgtatgaaacactcttcgccgaatcgctggacaagcgtttcaatcagtggcttaacacgttggggggagatatcggatgaatcgcgaaaccggttcaatcgccgcttttttgtatcagcagtgcggcgtgcccgtatatgaaaatgaactgcctgaacaatttcaggtgccgtcactatacattccgcccccatttgtttttgacgaaaatgatacagtctccacttataagaaaacgtacagtctgaatgtgaagctgttccatgccgactcggtgcaggcgctctatacagccgaccggatcgccgatgcggtgagagaatcaagacagctgattccgctgcttacggaatcaggggaggataccggtgatttcgtccgcatcagccgtatcgaaacaagagtcggagacaaaggcgaggcagtgatcacaatccgctggacgagccgctactactatcagaaacaaacatctcccgcactgcgggatgtggacattaacagcggggtgaaagaaaagtgaaacaacataaaaagaaaaacgccgcaacggcggaacgagcggttctttatgacacggcggatttaacaaagcacgcgaaggagcttttcggcgtaaaacctgagattctccagggggctttattcggcgtgaagcaaaaacaaatgacaaaagcgcaagccaagtcttacattgaagcatttttaaccaaggaggtcatgcaataatgaacggcggaacatttacgcaaggaaaagaaaaagaacgtgccggaatctattttaactttaaaacaaccgcccaggagcgggtatcgatcggtgaacgcgggattgtcgcccttcccgtcgcatccggctggggggaagcgaaaacattcgtttccatttcaagcattgaagatttgaataaaaaagtggggctcagtattgaagatccgtcactgattctgcttcgtgaggcgaaaaagaaagcaaaaaccgttttgatgtaccgtctgacagagggaatcagagcgagtgccgatctttcgcaaggtgttaaagcaaccgctttgtacggcggttcaaaaggaaatgacatcatcatccgcatcagtgaaaacgtccttgatcagaccgctttcgatgtgaccacttacatggatgaagcggaagttgacaaacaaacggtgaaaaaagccgaagaattaaaagcaaacggctatgtcacatttacgggaacgggcgaactgtcggcttccatcccgctgacaggcactgaggaagaatccggggaaacgttaaacccgcaggcaggcatccgtctcgcgggcggaactgataaagcaccggtcaactcagactatacggattttttagctgcggctgaaacggagaatttcgatgtcatcgctcttcctgtcgcggaaaacgatcagctgaaagcgacatttgccgcattcattaaacgccttcgcgatgcgcagggacagaaagtgcaaggggtgaccgcccattacagcggcgattatgaaggcattatcaatgttactgaaggtgtgctgctggaagacggaaccgagattaaagctgaagatgcgaccgcctgggtggcaggcgcaagtgccagcgccgcatttaatcaatccttaacattcgttgaatacgaaggcgccgtcgatgtgctgcaccgcctgactcatgatgaagtgatcgaacgtctttccaaaggtgaattccttttctcttatgatgcccgtgataagtcagtcagcgttgaaaaagatatcaactcattggtgacatttacggcagagaaaaacaaaaagttcgcgaaaaacaaaatcgtccgtgtgcttgatgcggtgaataacgatttgacacgtgaactgaaagccttaattaaatcgaaaaaaggcacgggcagcgatcttcctgcgacaaatgacggccttcaattcgtcaaaacgatgatcattcaatatttgactacgcttcaggatgcgggcggcatcgccaactttgattcagacaaagacattacaatcgggctgaatgaagaccgcgacggctttttaatcgatctcgccgtacagcctgtggatgcggcagaaaaattctactttaacgtggaggtaaactaagatggcattaaaagcgcaaaacacgatttcaggaaaagaaggccgtttatttctcgacggagaagagatggcgcatattaaaacgtttgaagcaaacgtggaaaaaaacaaatcagaagtaaacatcatgggccgccgcatgacgggacataaaacaacaggcgccaacggaacgggcacggcaacattctataaggtcacatccaaattcgccgttcttatgatggattacgtcaaaaaaggaagcgacccgtattttacactgcaagccgttcttgatgacaaatcatcgggccgcggaacagaacgcgtcactctgtatgacgtcaactttgattctgcaaaaatcgccggactggacgtagactcagaagcactcgaagaagaagtgccgtttacttttgaagatttcgatgtgccggaaaagctttctgaaacgttttaattaagatcggtatgagtgaaacaggccttttacaggcctgttttttataaaaaaaagagtaagggagttttcatcatgagcgaaaaaaacgaacaagtatatgatctgtcattctttatgccgggtaaaacagtcgaggctgaggagattcgggttccgctttcaaagcgttttgtcgataaaaaaggaaacatcgtgccttttatttttaaagccattacgactgagcgcattgatgaactggagaaggaaagcacgacatataaaaatgtgaagggcagaggccgagtaaaagacttagacagccagcgcttctatgcgcggatcgcggttgaatctacgatttaccctgatttccggtctaaggagctccgcgacgcttacaaaacggcagatccggtcgaggtggcaaaacgcgtgctttcagtcggcggtgagtatgcaaattggctgaataaagcgattgagatcaacggttttgaagatgaattagaagatctggagcaagaagcaaaaaactgataaaagatgggaataaggaagccgtgtatctctattacgcgatgcatgagcttcattattctccatcagaactgaaagagttatatgaagcaccgagacattttaaggcgctgttgtacggtttaatcggttacaagctggacattcttgaaaaacaagcgaagaaagggggagcgacatcatggcaaagctgaccgcccgttttgaattggaagatcgggtttcaaagaaaataaggaaaatccaaaatggcttcagagcgcttgagaaatacaggaaaatgacaaaacgccaaagtgaaattgatatacgcaaagagagtaaatctgttttaagaacaattgaccgcatccagcgctctatgaaaagaaagctgggcgcacaaatgatctctatttcagctgaagacggagccagtgccgtcattcaaaaggtgcaagcccaattagcgggtctgcctgcgtctttaaccattaaaataggagcaaaagacagcgcgacagcggcatttgagagattgcgggatctggctgccggttttaaaggatttaccgtttcactgtatgcgtcagacgaagtgacccctgccatggaacgtatcaaacgctatatgcaatctgcgttaaagaacgggtactctgtcactatacgcgtcatagatcacgtcatgaaaacagtcggccgaatttcagcgggcattgattcgctgacgggaaaaaacaatgttattcaattatcgttaaacgaaaaggtgacagcacagctggctgcaatgcaaaagaatatgccggacgtcggaaaagcttctgcatctgctgctcctgcttcgccgaaatacgatttttcaatgcttgactccattgcagacaccttcatgaaaaaagtcaatgacatcgcatccaaattttatccggaaacaatcatagcggaactggataaattcgctgcaagctttatgaagaaagcggacggaatcgcaagcaaattcagcccggcaacgattttagcagagctggacaagttcacaacgtcattcatgggaaaagtggacgaaatcgcgagcaaattcagcccggagacgattttagccgaactggacaagttcacaacatcattcatgggaaaagtggacgaaatcgcgagcaaattcagcccggcaacgatattagccgaactggacaagttcacgacctcattcatgggaaaagtagacgaaatcgcgagcaaattcagcccggcaacgattttggcagaactggacaagttcacgacctcattcatgggaaaagtagacgaaatcgcgagcaaattcagcccggcaacgattttaaccgaactggataagttcacaacgtcattcatgggaaaagtggacgagatcgcaagcaaattcagcccggagacgatattagccgaactggacaagttcacgacctcattcatgggaaaagtagacgaaatcgcgagcaaattcagtccggcaacgattttaaccgaactggataagttcacaacgtcattcatgggaaaagtggacgagatcgcaagcaaattcagcccggagacgattttagcagaattggacaagttcacgagctcattcatgggaaaagtagacgaaatcgcgagcaaattcagcccggcaacgattttggcagaactggataaattcacgacctcattcatggggaaagtgaacgaaatcgcaagcaaattcagcccggagacgattttagcagagctggatagattcgctgattcatttatgaaaaaggtagacggggttgtgagtaaattcagtccggagaccatattgaaagaactggataaattcactgattcatttatgaaaaagatagatgacgttgtcagcaaattcagtccggagaccatattgaaagaactggataaattcactgattcatttatgaaaaagatagatgacgttgtcagcaaattcagtccggagaccatattgaaagagctggatcattttactgattcgtttatgaagaaagtcgacgacgttgtcggtaaattcagtcctgataagctaatcgaccgcgccgaacaatttgtaaatgacacgattgaccgaatttctgagaaattcgattttctcaatccggataagattttggaaaaagtggagcagtttacatcctcactgttcggaggcattgataaaaagttcggcaaattcagtcctgatgcgatcatcgaaaaagctgaggcatttgttgataaaattgtcagcaagattgccaagaaatttgagaaattcagcccggacaaaatcatcgaaaaagccggggaattaatagaaaaaatattttcaggaatcgctgaaaaattaggcaaactcaatatcggcggattattaggaggcggcacgaaaaaagaaaagagtaagggcggccttactgccggcggctccaacggcccgaagcgtcctgatctggcaaagggttcacagcgcacggtaacagcgccaaaatcttcaggaaagtcagccaaaaaaaccggcggggctttggggggctgctgctgctgtatcggagtgacgaggggcaaaagcagtaaagtcgaagggcggaataaatcttcaaaacgaggttcatccgcaaagggaagcaaacaggcatccgtaaacacgccgaaaacaaaaggggcaggtaaaggcatcggcgcgcttttgaaaggcttgggagattcaaaggcgctaaaaggcggtatgaaagggttaaaaggtgccgctaaaggaattcccggcataggtgaattgttatcacttactgatttagccggcatcaataaagataatgcaggagagaaggtcggctcagcaggcggcggtcttgccggagccgcggccggagcggcaatcggcagcgttgttcccggagtgggcacattaatcggcggcgcggtaggcggcatcgccggcagtttaggcggttccagcttgggagaggcctttgattcaggagctttgaaagacacgtggaatgatatttccaaagcggcgcaaagtgcttggacaacaatacaagatacttggggaagcgtttcatcctggttcatggaaaatgtatggacgccggtttcatcggctgtcgtcggagtggcgacaagcatctggtcaaatatcgtgaatgcgtggacgacgattcaagggattttcagcacggtgtcatcctggttcatggaaaatgtatggacgccggtttcatcggctgtcgtcggagtggcaaccagcatctggtcaaatatcgtgaatgcgtggacgacgaatcaaggtgtcttcagcacagtatccggctggtttatgagcacggtgtgggggcccgtaaaatcggctgtcgtcggagtggcgacgtccatttggagtaaaatcacaggagcttgggataaaattaaatccgttttcagtacggtttccggctggttcatggatactgtctggaatccggtgaaagacatggtgaaaaatgtcggtaaaggaatatcagatgctttccagactgctttagatacggtaaagaatatatggaaagggttaagcggctggtttgagaaacatataaaagaacctcttgtaaaagtgggaacggccatatcagatgctttttctgcagcattcgactgggtgaaaaagatttgggataaaaccggcggcaaaatgatttcaggcataatgaactttgtcacaggaggcggcggagataaaaagaaaaaaacggacaaaaacgccacgggcggctacattacaaagccgaccatttcctggatcggtgaagccggtaaagaatttgtcattcccgttgacaacaatcgcggacgcggaaagatgctgctttcacaagctgcgtctaagctcggcatgcgtgttgtcgatgatatgggcgcggcttcggctcagtcttctgctgttccggcgggagcgggcggtgtttcttcttctgcatctgtgtcggccgcagcgtctgtagaggcatccggacttggcggaacggcttcatcactcggcaaacagtttactgaaggctttgacagcggaatcagcaaaaaagcggtggatatggacggctggaaggaaaaaaacatcggaacgccgttcaatgccctcatttcgtcttcaaccggttacggaaagcaagtcgttgcgggctatgccaaaggtcagaatacgtcacagacgggcaccgattcatttttaaaaacaaaggtgaaaacaccttatcaatcggcggttaatcaatcgtcatcatggggcgcctcaacggtgaaaggatattcggccggacagaatgcaaaagatacgggaacgtcgcaatacgtaagcacacatatcaataaaccgtttgtgcaatcaagagattccgcgaacggctgggggtcaggcctgatcggacacttcgtatcagggatgactgcaaaaggaagcgaagtcaaacaggcggccaaagatatggccaaaaaagtcgaggacgcattcagggaagagcttgatattcactcgccttcccgtgtcatgatgagtctcgggcgctttgcttcagtcggcgtcgtcaaagggctcggctcagttgacgtaaaaaaatacgccgaaaaacaggcaggctcgcttgcagcagccttttccggcatgggtgcagcgggaggaagcgtcaaagagtggcttttggccgcaatgaaagcaaccaatacgccgatcagctggcttccgggattaatgacgatcgcacagcatgagtcaggcggcaaccctaattccattaatctatgggacagcaacgccaaagccggacacccgtcacaggggcttatgcagacgattccgagcacctttgaagatcacaaagcgccgggcatgaatgatatcagaaatccaattcacaacgccgctgctgctatcggctatattaaaagccgatacggctcgatcagcaatgtccccgggattaaaagtatggctcatggaggcccttacgtcggttatgccaatgggggtctgattaccaaggagcagatcgcccgtgtcggcgaagggaacaaacgggagtggatcatccctgaagagcggggcatccgcggccgttatctgctgcaaaaagcggctcaagcgctcggcatggaagtgtccgatccgtcacagacggaaccggcggcgctttcagccggcacggtttccgcagccgttaaaggcggcggacaaaccgttcaaaaaacgggaacaaaagaaattaaaatcgaattcagcggcgatcagcatttccataacggacaggacgccgacagcctcgccgccaaaatcaaacaggcgctgattgatgaactgcaaaaagacatttataccggagcaaagggggccgttgcttttgactaaatctgtttacgaattttggctgtctcaggggaaggacaagctccggcttcccgttcttcctgaagcgattgatatcgcaaacagcgtgcagaatgattccgtgaaagtcaccggacttggagaggtgacgtttatcgaagaaccgggagcgaaagaaatttcgttctcttctttttttccgaaacggtacagcccgattgccgaatatcaaagcatcccttcgccggaaaaagccatttcagccattgaagcatggatgaaagcgaaaaaacccgttcagtttttgattacagggacaaaaatcaatgtcacatgcagcattgaaagctttaattacagcgaaggtgacaatgaaatcggcgaccggaattttgatatcgtactgaaagaatataaaaccgcttcgccaagaaaaatcaaacaaaagaaaaaaacgaaagcgaagcgcccgtccaaagcttcacccaaaacatataccgtcaaaaaaggggatacgctttgggacatcgccggcaagttttacggaaaacacacggagtggcggaaaatctggaacgctaataaaaccgccatgattaagcgcagcaaacggaatatccggcagccggggcattggatcttcccggggcagaagctgaaggtaccgcaatgaaacgggtgaaaagatgattgaactatttgtcataaaagaaacggagtggctcgagcttgtcacagaaagcgtaacgctggaaggacacagatatcaggcgccccgctccatcgaagcgacgattgtcgtaaagcagggcagccagacgtattacggtgtatcagagggggatacggttttgttcaaatggaacggaaaagaactgttccgcggtattgtttttgcaagaacgcccgatgagcataccgtcgccttcaccgcatacgatatgctccaataccttgtgaaaaaccaggacgtttacgtgttttccaacaagcgcgccgatcaaatattaaaaaggatcgccagcgattttcaaattcccgtcacatccattgccaacacaggccataccattaaatcactcgtttttaaaaatgatacaagcctttacgatatgatgctaaaagcgttaaagcagacaaaaagccagacggggcgcaattatcagctctattcagaaaaaggcaggctcggcttgcgtgaatggccggagccgtctgacatatgggtgctggaaacaggagttaatatcacagggtatcaatacagcacctcaattgatgacaccgcaacccgtgtcgtcatgcggctgcaaaaagacaagaaaaccgtgaaagcttccgcctcagacagcgcgggcatgaaaacattcggcgttttgcagtataccgaaacggtttctgacgacattaacgaagcccagctgaaacagcgcgcaaaagtgaagcaggctgagaaaaaaggcgttaagaaagagctgaaaaatatacaggcgatcggtattcctgggttggaaagcggattgcctgtctatatctcaattccggaaatcgggctgaagaaaacctattatgtagatacggaccgccatgaattccaaggaacaaaacataccatgacgattgacgtcacggagaaaaattcactgccggaggggacatcctgatgagattaagtgatgccattaaacatttagccgtcggagcggttgacgccgaagcgccggtggagctgatgccggccgaagtgacctccgtttcgccgctcgagctgaaattgaaagatcacgacaaacttttgattccgtctgatgcactcattgtgccgaagcggctgagatccggagaagatgatcacctccaggcgggagatcgggtgatgaccgccgccttaacaggaggacagtctttctttgtactggacaaaatttaaccggcatccggacggaaatgtaagagaatatcagcctattaaagccgcttcatcatccgaagagggcttttttacatgatcaaatctaaaaggagcgggtgcaatggccctgacaccggaaatcgaatttgaagatttggaggatgcgagtgaggccgttgaaacttcacaaacctaccgaattgattttgaaaacaaccggattaccaatgaactgataaacggactggacgcaatcagacaattcgtctatatcgctcttcacacagaacggtattcatattcggttttcagccatgatatcggaaacgaacttcaggaagtgctttcagatcagaacacgacggatgcttataaaaaaatggagattccaagactgatagaagaagccttgctgtatgatgaccgtattttggccgttaccaattttgagattgagaaaaaagatgatgccttcaccgtctcttttaccgttgaaactgatgagggcatgcttgagatagaggaggtgctgggtgaggatgtttgaagctcagacgtttgacgacattatggacagaatgctggcgcgcattacggcagatattgatacgagagaaggcagcgtcatttacaatgcgctcgcgcctgcggccgctgagctcgcaaagtcttatatttggcttgataccgtgctggagctcgtgttttccgatacggctcagggagaatttctggacaggcgggctgctgaagcgggaattgaacgaacacctgccacaaaagcggtcagagccggagaattcacagcgggcatcaccattccgccaggctctcgtttcttcgttgataacctgtattttcaatatacgggggatggaacgcttgaatgtgaaacagccggtgaagcgggcaatgccggcatttcagggcagaacctgctgccgcttgatacgatacccgggcttgagaaagcagtcgtgcgcgatatattaattcccggccgtgaggaagaagatgacaacagcttaagggcgcgctattttacccgtgtccgccgggaagcagtcagcgcaaataaacagcactataaacaatgggccgaagaggttgacggcgtcggcagggcgaaaatcttcccgctttggaacggagccggaacggtgaaggttgtcatcacaaatgcgaatttggaaccggcatcagatattctgatcaagaaagtaaaggattatattgatccggacgaagggcagggagaaggacaggcgccgatcggagcggcagtaacggtggaaagcgccgtatggaaggaaatcgaaatctccgcttccgtgctgcctgagctgaacagctcgatcgatgacgtgaaagcggagattgaaaaaggcgtcctgaatttatttaagaaaatggccttcgaagaaaacaccgtccgtttatcacaaattaacaacatcgtttataactcggcatccgtcagtgactatgccgatatcaaaatgaacggtgcggcggaaaacctcgtgctcagtgacgtggaaattcctaaactcaaagaggtgacaatccttgagcagactcgatgagatgacggcgtacctcccgccgtttttaacccgattaaaggagatggcacaactgcttgaggcggaagctcccgagtttgagcggcagaataacgatattttcgatttgacagatcagctctttatcacgacggcgacgtgggggcttgaccgctgggaaaaaatattaaaaataccgcgggaatcaggtgacacggaggatatgagacggctcaggctgatttccaagatgtcgaatattccgcccatcacacatcaagcgatcgagcaggcgctaaaccgttttttaaaacatccgtcagcttacgttcggatgtttccggggcagtatcgtttttatgccgatatcgggcttgatgacctgcagcacatgaacgagctgattgaaacgcttgaaaaaatcaaacccgctcatttggcgtatacactgagagccgcattaaacgaaacactggaaatcaaagaccgggtcattctcaacaatcggagataccgaaaagtcagtgaactgaaggtcggttattccgtcacactcaacaataacgaggtggtcttaccatgatatcagccgcttacagacagcgtgccgcagccgatctgaaaaacaggatcacaaaagtgctgttaaacggaaaagaaactccgattgcggacatttccgtaaaagatgccgcagtcaccgttctcacacgcagggaagaagacgtcaaacacattgaaaccgtgcagatgcttgacgaaacaggaaacgtcatcacagaacgaaaaacaaatttagatctcagcaataacagaacgcttgatttaagatttacctttgaggtggtgtaacgatggcttacgaagaaaaaacagactggcttccggacgatccgattaacgaagatgacgtcaaccgctgggaaaaaggcataaatgacgcacacacggatctggcggcccataaaaacgacatgaacaacccgcacaaaacgacaaaggcgcaaatcggcctcggaaacgtggataatatccagcaggcagcaaagaaagattttgatcagcaccatcaagatctggaccggcatgtgacgaaggaagagcgccagaagtggaataacgggcaattgtctaaaatgacaaaagataatggatccgcttttcttgatatctctgacggacaggattttcatcagaccgctgccagccagaataagacctttactttctcagcggctgcaactggagtaaataccccgcctaaaccgtcagagggtatatacctttattcttcaaagaataacggagaggcggccgctttctcagatgacgggggattttggagaaaaacgctgaaaaacggcatctggacggaatggatgccatttgaaaccgctgccggagcacaagcaaaagtaaatgagcatgccgacaaaacagatcttcatgtaaccaagtctgacaaagacaaatggaatgcagggcagttattcaatctgactgacaatgacgggaatgctaaaacggtaacggaaacaaacttagacaatataaaaacgtccggtatctactatatatcagttcagcatacggaaaataagcctgcggaatacggacaattaattgtaatgcaaagaacccgcggagcatcaccgacttttgtccaaatgtttatagacacagtgaccgccggaaatcccatatacgtccgaagtttcagcactaaaggcgtatggtcggaatggagccaaagagaaacagatgcaggctctcaagcaaaagtagacgctcacgctaataaaaaagacatccatgtcacacaggcggataaaaatatgtggaacggcgcacagctttcgaaaataacaaacgataacggcggctatcttcttacaattggtgatgatgataactttcttgaaaaaatcgttaaaaacggcagggcgttcggcaccttttattcaaccggcaaagcggcaaacagtccgagcaacgcttcgacccgcggcatgtttcattttacctctcttgacagtgagggaaagggaacgtttgggtatgtcattgccgtcgattataaaaataatatgttcacgaactatttggatttgaacttgggctggcagggctggcgtcgcctcattactgaacttgatactgagaatgtaccttggataaatgttccttataaaaatggcgctaaatcaggagacaggccgcttcaataccgcaaagtgggaaacacccttcacctgaacggacacgttcttacggacagagaagtggtattcgggagtgtgccatcctcttgtgcgccggccaaaggcgttgtgacgatggttgcagccagcggcaccaccggttacagcaaatttattatttattctaatggagatatgaagctgacgggaattatggccaatatagaaaataacgtgaacggctattatattgacctagttttggcactcacataaaggagcgagaatatgaaattaatatttccgtatgacaatgacaacatttatacaggctctccggttgagctttatccggattctgagacaggagattatatgatgccgcctaacgctgcggactttccgccggaaataaacggcgaaggcatgtggcgcccattttttgatgaagagaaacaagaatgggtggaaacggctgacgaagcatataaagacagcttaaaaaaagatacggctcccgattcaaaccagcttgcaggcctcggcggacagctggcgaatgagaaattggccagaaaagcagccgaacaagcgcagcagtcactcggcaggcaattagcgtctttaaaattagaattattaaacgtaaaaggagaatgaaaaaatgaagagacttaacttttgggtttacgctttgttttataagtgggccacaatagaaatggtaaaacaagctatgggctatgatgactgctctgccgaagatctggctgaaggtgtggccgcgaagtatatcacgcctgaggactttcaagaaataacgggtgaaacatacgaaaattataaaaatgctgtgtcataagccaaacggctttttttatttgtcatttttaataaatgagaaaaggaggacggccgatgaaaaagcattcatttgaatttcccgccgatcaacttggcagacccggcgccgtaaaagcttatcgcggtaacaaaaacgattatgtcacacctgttgctgatttgtccggaatggcagagcttcttaccaatacgccgctagaagcgatagaagtatacagccaattcggacaagaccgtttaggagccgtcttaatagacagagcacaggggtgggcttattcggaccgcagcggaactctttttatcgaagagagcgaggataacaattcgtggacggcttcacattctgtcgcagtcaaaggcggagtgctgaccgcttcggggtgggtcttcctgacaaaacgatattaccggttccgttttgaaaacggaaatcaaaagcagtccgaatttgttttataccaatctgtcggtacgggcggtgatatggcgttttcatatacagacgtgatttttcatgaaaatgcagcagaggcgggcgagggaagcatcttctcggcgggcgcttggaaaaaacttctcgtcgaaatcaccggcacggctgagtcgggccatgtcgcgttttgggggagatccatctcgggaaaaaacgtgccgatcagaggaatcaggtctgatgacgggacatcagccgccggtacgtcaggcacagaagaagtgtggtcatttgatattgccggctttaaggaaatcgtcatggaaatccagagcatttccggcgggagcctttctgtcaaaggcacggcattttcttaagaatgaagcttccgaagggaggtgagaacaatgtaagagggggggagcggaagtgcttctggatgaacaagcggtgcaaaaagaattcgcaggcatcaaaggtgaacaaaaggtgcttgaacagcgggtagccgcattagagcgggtatccgaccggcaggatcagcaaatcatgacgctgaatgaaaaactgaacaaaattgacgaaaacacaacatggattaagcggaccattacaggagcgatcgtgacagcaatctgcacgggcgtcattggcggagccatcgccatcatgtacaatctgctgcaaaagtaagggggaaaccaatatgaaattcgcggacaaaggcacggtcgtcaggacggtgcttcttttgcttgctttattgaatcaaactttgctgatgttcggcaaatcgccgctgaatattcaggaggaccaggtcagccagcttgcagatacgctgtatgccgccgggtcggccgtttttacaatcataacgactgccgccgcctggtttaaaaacaattacgttacagcaaaagggaaaaaacagcaggctttattaaaaataaacaatttatcgaaataggagagatgagaatatggtaaaaatcacacaggattttatcccggcaggaaacaataaccgcccaggctatgcaatgacaccgatttacattacggtgcacaatacagccaataccgcagtcggagctaacgccaaaagtcacgcaagctatgtgaaaaatcctgatacaccgacaagctggcatttcacagtcgatgatacggaaatttatcagcatcttccgctgaacgaaaacggctggcatgccggtgacggaaacggggacggcaaccgtaaatccatcggtattgaaatttgtgaaaacgcagacggcaacttttcacaggccgtggcaaacgcccaatggctcatccgcacattaatgacctcgcacggcattccgcttgcaaacgtcgttgcgcacaagcattggtcaggaaagctttgtccgagaagactgttggatacatgggatgagtttaaagcgggaatcggttctggggaaagacagacgtattccgtccaaaaaggagatacgctgtcagcgatcgcgcggaaattcggcgtcagcgtggccgatctgcagaaatggaataacatcgctgacccgaacctgattaaagtcggacaagtactgatcgtcagcccgccggttgaagcactgtattctcttccggacgaggtgattcagctgacagagccgtacacgtccggcgaaaaggtataccaggtgcaaaacgcgctcgccgcgctttatttctatcctgaaaaaggagctgtcaataacggaattgacggtatctacggtccgaaaaccgcagatgccgtggcccgcttccaatctgtaaacggactgacgtctgacggcgtctacggtcccgctgtaaaagcgaaaattctgatgcagctttaacaaaaaagctgagtcccgttcacattgcgggattcagccttttttcttttttaaccggttcaatagcctgagattcctcgcccgcatcctcagcgaataagcggaaagcccgaagcgtccgtaatccacaaactttacgcgcctgacaattttcttcacatcatcacctgtcgcatctctttgttggttttattatatgaaagataaggaaaaaaaggaataaggacaagagccgtgtctcctgtccttagtgtaatcaagcttttttttgtttatacttgtcaatcagccgctcgttttctttgaaaattctggcggtatgagggctgacctggtaacttgcgatacttgtcattgaacgttttttaaacattttgaacggtttcgctctttgttccggctgcccgttttgaaatgcctgctccatttaaccgtcaccttcctcttctattggcagcattaaatcataaatgctcgttagcgatgtgaaaagcaaataatcgaattccgtcaacaggttttccgacgtgagtttgatcacgtaatggcggttctggactgtaaacggaataagcacaagcctgcctttttgatcatagtagacgtctttacggttaagacgggactgaacgtccgccgcatcaggcatatgctccgtcaagcggtccttatccgcttgtgcggaatagtcgcacaaggaagctgtgacattcattttttcggcataagcggccagcagtctgctgatgccttccgcataagcttctgtacttccataatatacatggatcggttcatttttcaacagatattgataggttttcagtttttcaagataggagtgaagcatttcgttattttcttctaaaatttcccgcgtatccgtctctaattcattgccggcgagctttttgatatacgcgctcaaaaagataaaagcatcaataagggcgaagcagacggcaacaatcaaatattgtctccatgcggcaaagagcgattcgggatcatatgtccaatagaccatggagcccagtacaaatagtaaataccacgttttacggatggcaaacattttttcttttacctttgcctcataccgccaggatgcgtacacatataaaatgagtgcggccgccatcgtccacaccatgatctgaaaaaacaaaagcatgagcatccctcacaatttgaaaaatggtctgctatgttcattctatgtcatgacatcattttcctgtcacaaaaaaaaccgcttctgtaaagaagcggatgtcatcagaaaaacagatctaagatgaaaaaggcgatggcgccgagtgtacctgcaatcggcagggtgatgacccatgtaatgagcatccgtttagccgttccccagtttacgccttttacgcggtgggaagcgcccacaccgagaatggaagacgaaatgacgtgcgtcgtgctgacagggagatgaataaacgtggccccgaaaataatggctgcgccggttaagtcggcagatacgccgtttaccggacggattttcataatttttccgccgacggttttaatgattttccagccgccgatggatgtgccgagacccattgccagggcacaagagagctgcacccaaaaaggaatggcatcacttttatgtaaattggccgtcataagcgccatcgtaatgatacccatcgctttttgcgcgtcgttcgttccgtgtgtataggactgaatggcagccgtcaaaatctgcactctgcggaaacgtttatttgttttcgccaaattgctgtctttaaaaatcagcttcacgatcgaatatacgataaagccgagaacaaaggcgatgatcggtgataaaataagtgcttcgagaatcttaatgaaccctttataattaagcgttgcaaaacctgacgctgcaatggccgctccggcgatcgctccgataatcgcatgtgaagagctgctcggaatgccgaaataccatgtgatcaagttccaggcgattgcggcgagtagagccgccagaatgacaactgacccgttgtctaatgtataaggattcacaatgtcctttgtaatggttttcgccacaccggtaaatgtcatcgctccgagaaagttcatgatggcggccatgacgattgcgtgccgcggcttcagcgcttttgtcgaaactgaggtggcgattgcgtttgcggtatcgtgaaatccgttaatgaagtcaaataccaaagcgcatatgacaattaatatcgttaaaagtaatagagtatccattataacccctcgttacgcgtttttcataataatggtttcaaggttattggcaacgctttgacaagagtcggcaatttcctcaagcgtttcgtaaatctcgcggtactgaatcactttaatcggatcggtttctgtgccgaacagattttttaatgatttacggtgcaggttatcacagctgtgctcgtattccttaattttaatggcgtgagggtgaatgtccttcaatcggttttctgcaagcagctcaatcgtgattaaaatttccttcgcgcactctctgatgtatccgctgaacttatcgatatgctcatcggaagaagtgatcgagaaaatctccatcattgctgaaaaatgttcgattccgtcaagcacgtcatcgaggctgtttgtcagctcaaggatgtcttcacgttcaatgggagtgataaaagctttgttcagctctttaatcatgacatgaacatgattatctccttttgtttcaaactcttttaacgtatcggcaaattcctttaaagtcgtctggttcgtcactttaaagttgacaaaatattctgcggtttcgtctatgttttttgcgatttctgttaaaaggagtgagaacttatctttttttctttttatcattaaaaaccctccattgtttgaatgagacaatgcacacatcaaattattatatagccttttgtcgaaaaaaaacagataaagtcgaaaaaaacgcctcttgattttttcgtaaaaacgtgtctcatcctgtttttcttatgttacccacttcgccaaaaaaacgtaacatacttcgaattcagacatcttgcttaaaaagtataacaaaagatgtgaatttgctgtcaacttttgcacgtgattttgccagaaaaaaaacggctcccgtaaaaggaaccgtttttgtcagttttttctgccgtttttcagccaaaaataaagcggcagcccggcgaggccgatcaagagggacagcgcgcagctcagtgtatctgtaatgatcgtgctgatcagcacaaacagtgaacccgcgatggccaaaacaggaatgatcggatacaaaggcacgctgtaggcgcgcggttttccgccgcttttttttctgaggataaacacggcgaaaaaggccatgacgtaaaaaatataaatcatgaaaatagagatttcagacagcttatcgggattgctggcgatcataaaaataatggccagcgcgatctgaaatgacacggcaatccacggggtgcggaacgtcggatgcacccgcgaaatctgcccggcaaacggcagctgtttccgttccgccatcgcaaacgagacacgcggaaaagcgagaatctttccgtttaaacagccgaagatgctgacgatgattccgacgctgatcaattttcctccgatgtcgccaaacagcattccggcagcggtgccggtcgcattttcaccgagtttgacgatgtcggtcgcaggaagaatgtgcagcagcgcaaagttaatgaaaagataaatggcggtgacgaccagcagtccgcccgtcatcgctctcgggagcagcttttccggatttttcatctcgccgccgagtgccgcaagcagaatccagccgtcataagcaaacaaggtggccagtatggcagcgccgaaattcatgtccgacatgctgcttgtaacggctgtgaaaatatgctgatcgcctttccaaaggccgaacacgatcatgcagataatcggaatcaatttgccgacagtcgtaattccctggacgatgccgccatatttcgttccgataatgttaatgatgcttaaaaacaaaacggctgaaatcccgatcaatttagaccagccggaatcccaattgaacaagtgcgccatcaaggagccgaaatacaagccgattgctccgataatggcggggccgtaaatgataatttgaacccatccgcacaaaaagccccaaaattcgccgtacacttcttctagatatgtataaagtccgcccgttttcggaatctgagtgccgatttccgcaacggtcaagccgccggcaagcgtcaaaatgcctcctaacagccacgcgataagcgcggttttcgcatcaccggagtaggcaagcacggcgcctggtttcataaatacgccggaaccgatgatggtgccgataacaagtgagagggcgatggtaaggccgatctcttttttaagtccgttctcttcaatctgcatatcctttccctccagatgtaaaatcgttatgctgaaaaaactattttccatattgtaaaccctaattgctgaaacacgaataaaataaattttctgattttggtgttttgcctaaaagataaaggtttatgcttttgagaaggaaaaaataccgttttaaaagcgaacgttaatggtttttttaatatcaaaagttcgttattttgagaacggcagtctgcagaccgtctgtgaagcagatgggttgactttacgatccggataacataaattgtatatataaaatatctcgaaatcgagataattgactggaggataacataatgaaagttaatggaatacaccatgtatcagcattgacggctgatgcgcagaaaaatttagatttttatcgaaatatcctggggctgaagcttgtgaaaaaatcggtaaaccaggatgaaccgacgatgtatcacttattttacggtgatgaatcagccaatccgggatcggaattgacgtttttcgagattccgcggatcgcgccgtttcatgcgggaacaaacagtatttcttcaatcggcctgcgtgtcccggaagcacaagcgctgcaatattggaaaaaacgattcgaagagcatcaggtcgctcatggcgacatcatgacaatagcgggcagagagacactcgctttttgggatcatgaaggacagcggcttgtgctgacagctgacgaaaaaggaaaagacatcggtgaagcggtgaagcaaagcggcataccggaagaatattctttccgcggtcttggtcccgttgaattgaccgtcccgtatgcagaaccgacgctgcgtgtgttaaccgatgtgctgggcttcactgaaatcgggaaagaaacgcatgaagaccggggcacggttacggtgctcgaatccggaaacggaggcgcgcgtacagaagtccatctcattgaaagaaacgatcttccgcgcgagcgtcctggaaaaggcagcgtgcaccatgtggccttccgcgttcagaatgaagaggagcttgctttatggcaccgcatcattacgaaagaaggtttcagcaactcaggcattgtagagcgttattatttcaaagcgctgtacttccgggagccgaacggaattctgtttgaattgtcaacggacggtccgggatttatggttgatgaaaaatctgaagagctaggcaaaacggttgcgctcccgccttatctcgaacaccgccgttctgaaatagaagcacggctgaaaccgatacagtaaatcagaaatcatgacagatgcctcccggcttgacgggggcatctttttttgcttttttacccgttttgtcattctttttacctatttgtaaacggcaaaataattgtctttgtttattaataaatttttcacatttggttgttacacttgttcaaagttaaacaaaaggagtgaaaacacaggtgaaaatgaaaaaacgcgagatagacgcagtcttcattctcattttactcgcttccgcattcttgaatatgtacaacatctggaatgatgatacggtgaatccttattacactgcagcggtaacgagtatgcttcaaagctttcataatttcttttacgcttcatttgacgcagccggttttatcacggtagataaaccgcctgttacataccagattcaaacgatcagcgcgctgatattcggtatgcacgggtggagcgttatcctgcctcaggcattggcgggtgtaggttcagttctattcatgtacttattaataaagccgacgttcggaaaaacggcggcgcgcatcgcctcatttgtcatggcgtgtacaccgatcgcagtagcggtcgcgcggacgaacaatgtcgatgctttactggtctttttcctcttgttcgccacatggcttctctttaaagcgatcagaaaaggcagactgatctggcttttggcggcgttttttgtcgtcggagcaggctttaacacaaaaatgcttcaggcttatatgattttaccggctttcttgctgttctatatgattgcggcaaacaccacgattaagaaaaaaatcatctcattggtaagcgcgttagccgttttagcggccgtttcgttgtcatggccgctcattgttgacaatatccctgccggcaaaaggccatatgtcggaagcagccagacaaactccgtattggaattggctttcggatataacgggattcagcggctgacagggcaaagttccggcggcggccagggcgggccggacggaaacgcatcgaaagaaatgtcttcttccggcggttcttcacaaatgcaaaaaccgcccggccagtcagcaagcggagacaaatcacaaaccggcagtatgacggcacctccatctaacggccaaatgccaagcggcggtcaaggaggccctccaagcggcggagatggcggcggaggcggaggaaaaagcggtacaggcaccggctcgaaaatgcaatcaggttcaggaatgttcggaacgggaacccctggtccgctgcgccttttccaaacggaattatctgatcagatcagctggctcctgccgtttgcgatttttggaatggccggtttattgatcgccggggcgagagaaagaagacgattatcagcagaacagaaggaaacgatcttttggacagcgtggcttgtgccgattgccggattcttcagtgtggcggaatttttccaccattattatctcattatgctggcgcctccgatcgcggcacttgtcggtgcgggatgggtcgccctcgttcatctgtaccgcaagcaggcgggatggaaaacttggctattgccggccgctattcttgtgacaaccggatttgagctgtttatcctcagaaactacaatgatcaaatcggagcaggctggagcatcggagcaggcgttctcggcgcagtggcagcaatcgccctgttcgtattcaaacagcgccaaaaaccgctaagttattatgtttcacttgcagcccttctcgtcttgatggtcatgccgatttattgggcgagcacaccgcttctgtacggaggcaacagctcattgcctgaaacaggccctcagctcgcttcaacaagcggaaaaggcatgggaatggataacgcatctgtcaatacaaaactgatcaactatttagagaaacacaacgccggagcggactatctatttgcaacaaccgattccaacacggctgcgccttacattattaaaacgaaaaaagcggtcattgcgatcggcggattcagcgggtctgacccggccattacgctgactcaatttaaaaagctcgtaaaagaagggaaagtaaaatacttcttaacatccggaatgggcaaaggcggaaataacgatattgtgcagtgggttgagaaaaacggaaagaaagtatcttcagataaatggcaatcaagcacagatcagaaaacgaaaaatagtgatccagctgatacaaaaagcagcaaggccacaggtaaaaacagccgaatgagcggcgggccgggcggaatgaatcagtcagcttcactatacgaacttcaatctgatgaataggaggaaaaaacatgagcagacatattcaatattcaatagtcgtcccggtttataacgaggaactcgtcattcagacaacctatcagcgcctgaaagaagtcatggatcaaacaaaagagcattatgaattgatctttgtcaatgatggaagcaaagaccgcagtattgagattttaagagagcaaagtctgattgatccgagagtgaaaattattgatttttccagaaacttcggacatcagatcgcgatcatagcgggtatggattatgcagaggggaatgcaatcgccgtcattgacgccgatttgcaggaccctcctgaattaatccttgatatgattgagcagtggaaagaaggctacgatgtggtgtacgccgtcagaacgaaacgaaagggagaaacctttttcaagaaacagacggcctctatgttttaccggctgctgcggagcgtgactgatattgatattccgctcgacaccggagatttccgcctgctggacagaaaagtctgtgatgagatgaaaagattaaaagaaaaaaatccttttgtcagaggactcgtcagctgggtcggctttaagcagactgctgtagaatatgaacgagatgagcggcttgcgggggaaacgaaatacccgcttaaaaaaatgctgaagctttccatggacgggatcacaacgttctctcataaaccgctcaaggcggcaagctatgcgggaatgatcatgtccggagcgggttttctctatatgtttatcgttttatacatgaagctgtttacgaacagcaccattacgggctggtcctctctgattgtgatacagctgttattcagcggcatcgttctattaatgctcggaatgatcggcgaatatatcggaaggatttatgacgaagcaaaagaccgtccgctctatatcgtgcaaaaagcgtacggcatgaaaaacgaaaagatttatcgggaccagcatatgtcttaaccgaaacaccctgtccggccagcggacagggtgcttttatgtgaaataaaagccgcgggatgacagaatgtcccgcggcttttttcattcatctgcggccggtctgcgtgtgcagagagcgcatgatcagtccggttcccgaaagttcagtaaaatgcttgcacccagcgtcatacctcaagcagcgttttgctgaggaagctgaatgctcagctgcagcaagatcaggcctgtaacgaccagcaaaagtcctgtttgtttcatgtgtaagtatcctcctttgtacactaagtcatacggttgatccaggcctaaagtttccactgtacataaaaaatccaaggcggctgccttggatttttgttaagaagatgtttcttctttttgagtcagtttcatttttttcgtcatttccttgccgtttctgataatcttcacgtcaacggtgctgccgactttcgtattcttgtagagaatattgcggagttcgctgcccgtgccggtttctttcccttttaagctgataatgatgtcttctgcttttaatccggctttggcagcaggtgagccctgcgccacttctcgaatataaacgcctttattcagctgtttgccaaaaagcccgagtgtgccttcctgatagttttgcggtacttgttccaagtcgatcatgctcacgccgatataagggcgctccacctgtcctttcgtgagaagctcttcggcgatcggttttacatcgttgctcgggatggcaaagccgatgccttctacatcactttcgctgattttcatgctgttgatgccgatgattttgccgtctgtatttaagagcggtccgccgctgtttccgggattgatggcggcatcggtttggatgacgttgatgctcgactcgccggctgacgtagagatcgagacggttctgtttaagccgctcacgatgccttgtgtgacggtgcgggaaaggtcttttccgagcggatcaccgatggcgatgacggattcacccgttctcagagcggatgagctgccgaagcttgccgtttttgtcacgtgtttatcactgatttctaaaacggccaagtctgtcagagagtcgctgccgacgagtttagctgttacatcggtgccgtcatataatgacactttaagggaagaggcgccttcgaccacgtggttattcgtaatgatatacgctttgccgtttgctttcttaaaaataacgcctgaacccgatccggtttccgcatcatcacccgatgaatttgagtttgaatctgagcttgatccgaatccgaataaatcggaactgctttgctgcttctgcagattggtgatcccgacgatcgccggtgaaatgtcttccaccatattcgaaatgctgcttgaatttgccgatgagctgtttgccgatttgccgctgtctgattcagaagatgtctgcttggcggttaccgatgacgtttcctgagcgggagccggattggaagtatcttgagtctgatggtctccaagcggcgtaaatgtatagatgccgagggcgagccctccgccgatcactccgccgagaagcggtctgaaccagccgaagcttcgttttttcttgtcctcgtccggcgcggaatatctggccgtctgcgggttttcttttactaaaaggacttcctgttctttttggtctgtccgattttcatcacgatagttatccatcatgttcactccgtttctctatttcatcatagcatgatttgcctattattactgactccatcttaaacaaaaagtgtgggataataatgaaaagattgtgggaaattgtgaaaaagacgaaatcggacggcggcgctttatattgacaatttccatcggatttgaaataataaatgagatattatgttcaatccttcacatgaaaagatatgaaaattctgtcaagctaatgggggagatctgttagctttttcactttgtcaaatagtcagaaaggagctgtcacatgaaagaaaaacatcactggatcatttctctgcttgctgtattggcggtcgggccggggctgatgtcgaataccgctctttcggctgtccaaagccttgtccggcagacggtcggcggggaaaactttgactcttttcatccgattattatcggtaatatggcatttgccttattcgtgccggcggggccgtatttaagaaaaagattcggctcccggcctgtctatatgatttcgatggccgcgggtgtcatcggagcgctccttgctgctgtgacaaatgatatttatccgctcgccgcgggccgttttttacagggagctgcggcgggcactatgctgatgattatgatcccgatgctggtgctttcgtttccgattgagcgccggaattacgcattatttgtgttaatcggcggattttacgggtccgtcattatgggaaccgttttaggcatggcggcggcaagcgccggccattggcattggctgttcggcatttttggcctgctgtcttttttcggcctcattttcagttatatgtggctgcgggatgacgctcataaaaatgctgaaaaatctccatttgacggcatcggttttctgttagcgggtgtatcagccgtgctgaccgcctatacatttattcatctgccgaaatggggcttttcatcatggcagacatgggcgggatttggaggaagcatcgtcattcttctgatcttgctgatcatgcagtacagaaacgaacatgcgctgatttcgattaaacttatgctgattccaaagccgattctgggtgttttcatgatcgctgcgggcagtatttccatagcggtcagtctttctgcatttcacggggagcttcagaccgcatatcatatgtcacaaactcaactgatattcctttatgcgagccttttgggaggcgtggccatcgccgctgtcatcagtgcattagcatatgataaagtcggtccgggcatgctcggcataataggctctgttatactggtgttcgtgaatttccaatggatgacggcggatcatcatataccgcttattctatttgcggggcttttcgtgatgctggcggccgggacagggcttattgtggcagccggactgatgggagccgcgttgggcggaccgcttccggaactggtgaaacgcatgacggcagttcagtttttgaggcttttcatttatatgggcgcacctgttttaatagggtattttacgaaaagagatgcttccggcacgcttcggggcgcgcgcggcacacaatcaccgcatgacctgctgatggggacatacagcgatttgtttcttattgctttcatcttaagcttgcttttagtgtgtttatcatttgtcatgaatgcgaccggcatgggacataagctggcgcataaaccgcatgccgtccgtaagcaggcggctgaacagccttcgccgcaggctcctgaaccgatcaggcatcaggtcattcccgatcatgaatacagaagtgcggtcagacagtttcagcgtcatcatataagcaaaaacagtatgtaactttttctatcagcaaacccttttcccggtgaaaagggtttgttttttcccataatggcagaatggtatattgcatgtttcatccttttttaatataatttgttagaatattcataatttaatatcgaaattttaagtaaaaaaggaggcattacatgaaactgtatctatctgtggatatggaagggatttccggactgcctgatgaaacatttgtcaattcccgcatgcacaattatgagcgcggcagggttctgatgaccgaagaagcaaactggtgcatcgcagaagcgtttaataacggatgcacggaagtgaccgtgaatgacagccactcaaagatgaataatctgctcgcggaaaaacttcaccctgaggcagaactgattacgggggatgtcaagccgttttccatgatgcaggggcttgatgaatcgtattcaggtgtgatgtttatcggctatcatgcgagagcgtcgatgccgggcgtcatgtcgcacagcatgatattcggcgtccgccacttttacataaatgataagccggtcggtgaactggggttaaatgcctatctcgccggattttacgatgtcccggtcatcatggctgccggagatgattgcgccgcaaaagaagcggaggagctgatcccgaatgtgacgactgccgccgtcaaacaaaccatttcaagaaccgcggtcaaatgcctgtcccctcaaaaagccggacggctcctgacggaaaaaacagcctatgcgctcaaaaataaagataaggtcaaaccgctgactccgcctgaaagacctgtattaggcattgaatttgccaactacggacaggctgaatgggcccatttaatgccgggcacagaaatcatcccgggaacgacaatcgttcaatttcaggcaaaagacatgccggaagcctatcaggccatgctcgtcatgacagaactcgccatgagaacaacattctgttaaaggggtgaacggcattgctgcggtattttatcaaacgttttatcgccatgattatgaccgtcctcgtcattaccactctgacatttgtcatgatgaaagtgatacccggctcgccttttaacgaagagcggggcacaaacgaagcggtccagcgaaatctcgaatcctactaccatctgaacgaacctcttatcactcaatacgccatctatctaaaatccattcttacctttgatttcggtccttcaattaaaaaaccgtcagacagtgtaaacgctatgcttgaacgcgggtttccggtctcatttgagcttgggataacggcgatcatcatcgctgttatttccggactcgcgctcggcataatggccgctctcaggcgcggcggctttctcgattatgcggccatgagccttgcggtgctcgggatttccattccgaattttattatggctacgctgctgattcagcaatttgcggttcatctaagatggtttccggcagctacctggacgagtcccgttcacatggtcctgccgactgttgcgcttgccgtcggtcccatggccattatcgcgaggctgacaagatcaagcatggccgaagtgctgactcaggattacatccgcacggcaaaagcaaaggggctttctcccgtcaaaattgtgatcaaacacgcattgaaaaatgctcttatgcctgttgtgacagtactcgggacgcttgccgcaagtattttaacgggcagtttcgtcatcgagaagatttttgccataccgggaatgggcaaatatttcgtagaaagcatcaatcagcgagattacccggtcatcatgggaacgaccgtattttacagtgtgattctgatcgtcttgctgtttctggttgatttggcatacggcctgttagacccgcgcataaaacttcataagaaagggtgatcctgatgaatctcccgcaagaaacggtaaaacacacagaagtgcccgatgactggtttcagccgggcgcggaaagaaagggtgaaaccgagtcggtcaagcgtccgagcctgtcttacagtcaggatgcgtggcggcggcttaaaaagaacaaattggcgatggccggccttgtgatattatgctgcctgtttctatcggctgtgttcggtccgctgatatcaccgcacagcgtgacaaggcagacgctcgccgagcagaatcttcctccgtctttttcacactggttcggaaccgatgaacttggccgggacgtgtttacaagaacgtggtacggagcgaggatctctttatttgtcggtgtgatggcggcgctgatcgactttttgatcggcgtcatctacggaggcgtcgccggctacaaagggggccggacagacagcgccatgatgagaatcatcgaggttctctacggattgccgtatctgctcgttgtcattttgttaatggtgctgatggggccggggctcagttccattatcgtcgctctgaccgtgacgggatgggtcggcatggcgcggattgtcagagggcaggtgctgaggatgaagcatgatgaacacgtattggcttcgaaaacgtttggagcgaaaacatttcggatcattaagaaaaatctgctgccgaatacgatgggagccattattgtccaaatgacgcttacggtgccggcggcgatttttgcggaatcatttttaagttttctcggactcggcattcaggcgccgtttgcaagctggggagtcatggcaaacgacgggctgccggcgattttatcaggccattggtggcggctgtttttccccgcttttttcatttccttgacgatgtacgcgtttaacgtacttggagacggcttgcaggacgcgttagacccgaaactgaggaggtaggaaaaatggcgcagcaagttctttctgttcaaaatctgcatgttactttttcaacatacggaggcactgtaaaagccgtcagaggcgtcagcttcgatttatataaaggtgaaacgtttgcgatcgtcggtgaatcgggctgcggaaaaagcgtgacgtcacaagccgtgatgggtcttcttccgaaacattcggcaaagattgaatccggaagcatacaatttaaacagaaagacctttgccaaatgtcggatcgggaaatgcgggcaatccgggggcgcgatatttctatgatctttcaggacccgatgacggcgctcaatccgactttgaccatagggaatcagctctcagaagcgctgttggaacaccgcgccatgacaagaaaacaagctgattccgaagttctcgccatgctggatctggtcggtatcccggactcgaaatcccgcctgaagcagtacccccaccaattaagcgggggcatgcggcagcggatcgtgattgcgatggctctgatctgcgagccggaaattatgatcgccgatgaaccgacaacggctcttgatgtgacgattcaagcacaaatccttgaattatttaagaagattcaaagaaaaacaggcgtgtctattattctgatcacacacgatctcggcgtcgtcgctcagaccgccgacagagtcgccgtcatgtatgcggggaaaatcgccgaaatcggcacgaggcatgatcttttttaccgtccggctcatccatacacaaaggggctgcttcgttcagtgccgcggctggatatggaggatagtgagctgtcgccgattgacgggacgccgcctgatttattcgatccgccgccgggctgcccgtttgccgcccgctgcccggacaggatgatcgtctgtgaaaaggtatacccggcaacaaccgtgaaatccaaaagccatatcgtcaactgctggcttcaggatcaccgtgcagagcggctgaagcagcagctgacggcagcagaggaaaaagggggattgaaatgaaaaagagatgggcgatcggtgtgattgctgttgtttcgtttgctctgatgggctgtacagccaatgaacaggcggggacagaacccggcaaagcaaaagaacaggggggtgaaacggtgctgcggctcaataacgaaaatgagccgacctcacttgatccgccgatcggatttaataatgtttcctggcagccgctgaataacatcatggaaggattgacgaggctcggaaaagataataagcccgaaccggccatggcggaaagctggaaggtgtccgctgataagctgacatataccttcaatatccgggataacgccgaatggacaaatggcgatcccgttacggcggaagacttcgtgtacgcctggaaacggatgctcgatccgaaaacgggcgcatcttccgcttttctcggctacatgatcaaaggcggggaagaatttaacagcggaaaaggcaaacaagaagacgtgaaagtcacggcaaaagataaaaaaacgcttgtcgtcacattggcggcaccgcaggattattttctgagcgtcgtgtccaatccggcgtatttcccgattaatgagaaggtcgccaaggctgatccgaaatggttcactgaagcaaaaacttttgtcggcaacgggccgttcaaactgacggaatggaagcatgacgacagcatgacgatggtcaaaaacgagacatattgggataaaaagacagtgaaactggataaagtcacatgggcgatggtcagtgaccggaataccgactatcagatgttccagtcgggggatttggataccgcctttgtgccggcagagctgagcgagcagctgatgggaggaaaaaatgtccgcacgtgggatcaggccggactctatttctatcgttttaacgtaaaaatggagccgtttcaaaatgaaaagatcagaaaagcgttcgcggcagcgattgatcagaaagaaatcacggattatgtgaccaaaaacagtgaaaagccggcacatgcctttgtatccccaggatttactcagcctgacgggaaagatttccgcgaagcgggcggcagtttattaaatccggatgattcagaagccaaaaaactgctggaaaaaggcatggcagaagagcattatgacaagctgcccgccgttacattgacatacagcacaaaaccggagcataagaaaatagcggaagcgattcagcagaagctcaaaagtgtgctcggtatagacgttaagctcgccaatatggaatggaacgtctttttagaagagcagaaaggactgaagttccagttctctcaaagctcatttttaccggattacgcagatccgatcagttttctagaggctttccagacggataattccatgaaccgcactggctggggcagcgcggcatacgacggctgcatcaagcaggcaaaacaggaagccgatgccaaaaaacgttttgcgctcatgcataaagcggaaaaactgctcatgaacgaggctccgatcattccgatttacttttacaatcaggtgcatctgcagaacagcggcgtgaagggcattgtccggcaccccgtcggttacattgatctgaagtgggcggaaaagtcctgatcttacagcggaaacatacgccgttcttttgccgttaaaggagcggcgtgtttcacttttcaatccggaaaggagattgaaaaagtcatgaaccataaaccgaaagcactgcaaaaaggcgacacggtcggtgtgattgcgcccgcaagcccgcctgagagcgggacgctgcaaaccgcgctgctatttttagtgaatgagcttggccttcaagtgaaactcggccgggcgctgaagacccgtcacggctatttggcgggagaggaccgggcgcgcctcgatgatctccatgacatgtttagtgatcagaatgtcaaagcggtgatatgcgcgtgcggaggattcggcacgggccgcattgcctccgacatcgatttcggcttaatccgccgcaatccgaaaattttctggggatacagtgatatcacgtttttacataccgccattcatcaaaatacggggctcgtcacatttcacggtccgatgctgagcacagatgtcgggcttgaaaatgctgatcccctgacaaaagcgtcgtatcatcagctttttacagaaacggaatttacctatacggaggacatttctcccttagaggtgctgacaggcggaagggccgagggagagcttgcgggcggcaacttgtcgctcattacgtccacactcggcacgccgtttgaaattgatacaaaagacaaattgctttttatcgaggatattgatgaggagccgtatcaaatcgacagaatgctgaatcaattaaagatggccggaaaactgtcagacgcagccggaatcctggtctgtgattttcaccaatgcgaaccgaagcataaagaaaagtcgcttactttagagcaagtgctgaacgattacattgtcaaatcagggaagcccgcgctcaaaggctttaaaatcggccattgttcaccgagcttcgccgttccgatcggagcccgcgcggttatggatgcggcggccaaagcggtaacgattgaatcgggggtttccggaagggagtgatcaggcgtgaggattacagatattcaaacgggacggatgtccgtgccgctgaaaaagccgtttaagaccgctttacgcacggtttacaatgctgaatcggtcattgtgaagcttacttttgacaacggtctgaccggctggggcgaggcgccgccgacggttgtcattacaggcgacagcgcggccggtattgaaagcgccgtccacgatgtgctgaagccggctctcttgggacggagcctttccggcacggaagctgttttgtatgataccagccggctgttggaaagaaatcaaagcgcaaaagccgcggtggatatggctgtatatgacggatgggcgcaaatgcacggacagccgctttaccggcttctcggcggctatcggaatacactggaaacagattttaccgtcagcgtcaattctcctgaggagatggcgggggatgcagaccgttatgtgaacaaaggatttcatattttaaaggtaaaagtcggcataggtgacatatcggacgatgttgcgcggattcaggcgatcagatcacgtgtcggcggaaacgtcaaactgagattggacgcgaatcaaggctggacgccgaaagaagccgtgactgcgatccgaaagatggaagacgcaggcctcggcattgagctggtcgagcagcctgttcacaaagacgatatcgccgggctgaagcaggtcacagatgccgtagacacgccgattatggcggatgagagcgtctttaccccccgtcaggcatttcacgtgctgcagacgagaagcgccgatttaattaatattaagctgatgaaagcgggcggcataaagcaggcggaaacaatcaatgcgatggcggaaacgtgcggcgtggaatgcatggtcggcagcatgattgagaccaagctcggcatcaccgccgcggcccattttgccgcgggcaaacggaatgtgacgaggtttgattttgatgcgccgcttatgctgaaagatgatttgattcaaggcggcatcacatacagcggcagtcagattacgattcccgacgaaccgggtctcggcattaccggtgtgtcgatacaagagggggcgaaaagatgagagcagccgttacagcggcggcagccaacgtatggacgctgccgtcatctccccgttcgtatgatgcgccgatgcttgaaaacccgccgcagatcagaaaatggttagcgtctatgggatatgaagagcggctgcaattatgcacagacaatcttgtccaaacgcaagcgcttttcggggaagaggtgatcattctcaaagaggaaggggaatgggcttttgtcgccgttcccggccagccttcaaacaaggatgtgcgcggatatccggggtggatgaaaaaaagccagctttcaaaagacggctttcatacatcttcccctgccgtatggattaccaaaccgacagctattttatatcacacaaacggcgaaccggacttggaagtaagtttcttaacgcgtcttccggcatcaggacgtgagaaaggctttttccgggtggtgacgccgctcggagaacggttcgtaaatgaagctgacgcagacgagtgccggcatacggaaggacgggcggccgatgtcatcgaaacgggcatgatgtttctcgggcttccgtatttatggggaggactgagcggtttcgggtttgattgttccgggtttatgtattcgatatttaaagcaaacggctatacccttccccgtgatgcaaaggaccaagcaaaagccggatgcggcgcggcggtaaacgatatccggccggctgaccttttgtttttcgcctatgaagaaggaaaaggcgcgatccaccatgtcggtttggcgctgggagacggccggatgctgcactccccgaaaacgggaaaaacaatcgaagtgctgtcttttgaaggaaccgtctatgaaaaagaattatgcaccgtacgccgctgtataagcgaaaagggggaatagaaaatgacggcatctccgctccttgaagtcagcgggctgaaaatgcattttgacgcaggaagaaagaaagccgtaaaagcagtcgacggtgtcagctttcacattaaaagaggggaaacattcggacttgtcggagaatcgggatgcggtaaatcgacgctcggaagggttattctccgtctgtatgacccgacggccggttcggtatcatatgaagggacggatatacaccgtgccgcggcagaacagcggtcggtcttcttccgcaagctgcagatgattttccaagacccttacgcctcgttaaatccgcgcctgaccgtaagtgaaattattatggagccgatggaaatccacaatctttacaatacaagaaaagcccgtctgatgatggcggatgaactgcttgaagctgtcgggctccatccggatttcggcagccggtatccccacgaattcagcggcggacagaggcagagaatcgggattgccagagcgctctctctgcatcccgaatttatcgtggcggatgagccgatttccgcgctggatgtgtcggtacaggctcaggtcgtcaaccttttaaaaaggcttcagaaagagaaagggctgacatttttatttatcgctcacgatttatcaatggtcaagcatatcagcgaccggatcggcgtgatgtatttgggccgcatgatggaaattacagaaagcgctgcgctttaccgggaaccgcttcacccttatacgaaggcgcttttatcctcaatcccgattcctgatccgcttcttgaggacaagcgtgaacggattattctgaaaggggagctgccgagcccccttaacccgccgagcggctgtgtattcaggacgcggtgtcctgaagcgatggagctctgcggtaagataacgcctgagcttgaagaagtgaaggcggggcgttttgtcgcctgccatttatacaaaaaagaaagctgacaatataaagtcagctttcttttttaattaaacctgatgcagaaatgacacgcagaccggatacggaaccggaatgtcagattgaagcagagtcaatttgcctgtttccgggtcgcgttcaaacaaaaccagatttcccgtttcttcgtttgacgcgacaaggaatgtctcggaagggtcaaacgcgaaatcacgcggccagtttccttctgtcggcacccattcaatcagagacaattcaccggaatattggttgatcttatagatggcgatgctgtcatgtccgcggttggcggcataaagaaatctgccgtctttagatatgcggatcgcgctgccttgcgatttgtccgtaaagccttcaggcaaagcggaaatgacctgcagctctctgaattcacctaaggtcgggttgtattcaagcgcgatgacttcattgctgatttccgtcatgacataggcgtatttttccgccggatgaaaaacgatatggcgcggccctgaacccggtgcgaaggaatgagttttcacctctgtgagcgaaccgtttttcatttggtaagtatacagcgtatccgtccctaaatcgacggctgcaatgtagttatgctcaggtgtatagcctgcgaaatgggtatgcggcttctcttgtctttcatgaggacctgttcccgtatgagcggcttcggcagtcggctcctgcagactgccgtcctcattgacgggaaaggcgtgcacttttccgctgtggtaattagcggttaacacatattcatgtttatcatcaatgctgacgtggcatggagacgggccttcaatcagctgatggttcacaaaagttaattccccgctgttctgatgaatctgataggctgcgacgccgccttttccgtctgccttttcaatggaatacagcatgctgttatcagaattcggagtgacgtatgtcgggttgccgagctttgctgccagcttcggacggctgagccgtttcgcttctgtatcaagttcaaaacaataaatgccttcgcttccgccttttgtatatgttcccgcgtatcctatgtacttagccattcggtttccccctttagagtcttgtcttctctatattaacgtatcttgaaggaaactgccttgtaaatgtttaagatgttctgacaagcggcaaggtgcagcagcggaaggaaccgcctgatttaataatttcggaaaactcggtttcaatgaccgtataacctctttttctgagctcgcggttcgtatgacggtgctgcggcaggctgataattgtctgattgccgattgacaggatattcgggccgagcgtgaattgctcttcttcaggcacttctatcatctcaaaacgttcggcgagaagatcaatttctttctgccgcaagccatttttgcagtatagcgcttccgtttccgagatcatattaaatacacagtctaaatgtaagaaatcctccttgagagggatcggcacaactgtcatctccggcagcgcctcctgcagctcccggacagccgctttatccgtgcgcttgctcagcccggcgtaaacggtgccgtctgcgatcaagatgtcgccgccttcaatattcgcttttttcagtcgcgtataagggattttcttattgtcaagcaggttttgaaacactttttcttctccctgccggactgaagccgccatgtttgaaacaaacgccgtctcgcctaaaacaaatccgatatcccgggtgaatacctgttcaggcaatgcgggatcggcaggcagcaggacgacttcaatctgatgagatcttaaaatgtcaataaactcactatgctgtttgagggcaacgggtatgttaacattttcttgtttgaaatgtttctgcgttccgttaataatatccttgatggccatgtgttccggccggcataagatgactgtctgcaaagcatcaaactcattgcggcaagccggtttccgcgtggatttgggaatagatatgtccatgtgatatcctcctatcggtattcaatgtgcgtttattattcccggatgtgatgaataataaaacatttatgagagaatatctaaccaacttaatatttaaaattttagacaaaacgatcaaagtattgtttaatagggtacagatgaatgagtcaaaacgaccagacaccaaaggggagtttaaataatatgaagttgccagaatcaagattttgcaaagaaacaagggttgttaaaacaagcagggtttttccgcttgatacgaataatcacaatacgctgtttggcggaaagctgatgagctacattgatgatatcgcttcaatttccgcggcacgccactgccggtgtgaaacagtcacggcctcaatggattctgtagattttttgcgccccatcggccaacaggattccgtatgccttgaatcttacgtcacatgggtcggtacatcgtctatggaggtgtttgtcaaagtcattaaagaacatctgataacgggcgaacgcgagcttgcggcaacgtcgtttctgacctttgtcgcgcttgattcaaacgggaaatcggtacccgttccgcggatcgtgccggaaaccgaggaagaaatcatgcttcacaatacggccgttcagcgcgccggagaacgaaaaaaccgcttaaaacacagcaaggccctggccgaggcgctcggaacaaataaaccttggtaatcgtcaaaccgcttttttaaaaagcggtttttttatgctgagaaaggacttttcctgccggatccataatctattacagggaaaggagacgtggcgtgcatgatgaaacataagtcttccggcaccatcctgacaaccgggcgtatccgtctgcggactatgcgggatgacgatgaagaaaatttgtacgggctgtttaccgacagagaggtcatgaaatattatccttctcttaaaagcagacgggaaacgaaggaatggattgcctggaacaaacgattggccgcaggatacggcgtcagtctttggatcgcagaggataaagagacgggcgcatttctcggtcaatgcggaatcgttccgcagacggtaaacggaaacactttgatggaaatcggctatatgtttgcccgccgccgctggggctgcggctatgcgacagaggcggcgaacgcctgtctggactacggttttcatacgcagcaatacggacgcatagcggcgctgattgatccggaaaacgctgcctccgtccgtgtcgcggaaaaaatcggtatggtgcccggtgagaccgttaccaaatgggagaggcagctgacggtttttgacatcaaatctgacgttgaacgtttcggcgaaatgtagtatgatacgaacagacatgttttctagggttccgcatgttcatacatggcctggtccgagagaaaacacatatgcggacatatcccgcatatgcacacggagggaaaaaagcccgggagagtcaatctcatgtgagacgactatccgggcttttttgtattgtccggatacagaaagggtgaagaacatgaaatggggtttagtggtcatagcggccgtatttgaagtggtatgggtcaccggcctgaaacatgctgattcggcactggcgtggagcggcacgattgtgggaatcatcatcagtttttatctattaatcaaggcgacagacagcctgcccgtaggaacggtatatgcggtctttaccggactcgggacagcgggcaccgtgctcagtgaaatcctgcttttcaaagagcaggccgatccggtgaaaatcgtgctgatcggcgttttgctgatcggtgtcatcggattaaagctggtcacacaggataagcctgagacgaaggaggagaaggcgtaatgcattggatcagcctgatagccgcgggtctttgtgaaatgcttggggtcattttaatgaatcaatttcaaaaagaaaagaaagtcaaatggattcttttcattatcgccggatttgcggcttctttttccctgctttcttatgcgatggagacgatcgcgatgggcacggcctatgcgatctggaccggtatcggcacggcgggcggcgcattagccggcattcttttctacggcgagcagaaggatgcgaagcgcatctttttcattgcgcttattttatgcgctgccgtagggctgaaaattctttcgtaaattgatttttatcaaatcttcagtataatctattagtaagttacgaattatgaagatacgagggattaaaacagatgaattcatatatgacacagcggctgaaagaataccgccgcgggaatgaggaaaaagggcgcctgcttgtcagctgccccgaccagccgggaattgtatcggccgtgtcggcgtttttgtttgaacatggcgcaaacattattgaatcaaatcaatacacgactgaccctgaaggcggacggttttttcttaggatcgaattcgactgcaagggcattcgtgagaaaaaagaggacttacagcaggcgttcgcctcaatcgcccagacattcggcatgacatggagcctgtctctggcaagtgagctgaagcgggtggcgatctttgtatcgaaggagctgcactgccttcatgaactgatttgggaatggcaaagcggcaatatgatggccgaaattgcggtcgttatcagcaaccacgaagaggccaaagaagtggtcgaaccgctgaatattccgttccattacatgaaagctaacaaagacatccgcgccgaagtggagcggcgccagcttgagctgctggagcggtataagattgatgtgatcgttcttgcccgctacatgcagattttgacgtcagattttgtatctgcccatccgaatcggattattaacatccaccattcatttctgccggcctttatcggcgctaatccgtataaacgggcttatgagcgcggagtgaaattaatcggcgcgacctctcactatgtgacggacgatcttgacgaagggcctattattgaacaggatattgaacgcgtcgatcacagagatcacgcagaggatctgaagaatatcggcagaacgattgagcggagcgtgttggcaagagccgttaaatggcatttggaagaccgcgtcatcgttcacggaaacaaaacgatcgtatttaattaatgacggtccgccggggaggcggactgttttttatgcatgaaaatgtcttgacaagaacctgttttctttgcataatataaaaaaatcattgagcgttgaagaggatcagtacgcagaactttctgtgacagagagcaaaatggcccgctgaaacattttgccgcatgaaacctgccgaacctgccttggagtcctgaggggaaaactcaggcgcgataacctggcgttacaggaaagcgggacgcgtgaaaaacgcgttcaaacaaggtggtaccacggaaagcccatttcgtccttatttttcaggacggaatgggctttttttattgacgagagccggtttggattgattgccacggaggagaaacgatgaaaaaacaaagaattgttgtgaaaatcgggagcagctcgctcaccaacagtaacggaagtattgatgaagcaaaaatcaaggaacatacggaagccatttctttattaaaagaaaacgggcatgaagtgatcctcattacctcaggcgcggtggcagcgggtttttccgctctcggctatccgtcgcgacccgttacgataaaaggaaagcaggcagctgccgcagtcggccagacgcttttaatgcagcaatatatggaccatttaaaaagatacggtctgacgccggcacaaattttattaacaagaaatgatttctcaaaaagagagcggtacagaaatgcctatgccactgtaatggaactgttggagcggggcgtcgtgccgattattaatgaaaatgattccacatcagtcgaagagctgacgttcggtgataatgacatgctgtcggcgcttgtaagcggtttgattcatgcagaccaattaatgattctcacagacattaacgggctgtacgatgccaatccgaatgaaaacccggacgcaaagcggttcgactatctgaatgacatcacaccagaattgctcggatatgccggatcagcaggctcaaaggtcggcactggaggtatgaagtcaaaacttctcgccgcccagaccgcattgtcgctcggggtgaaggtatttatcggaaccggctccggacgggaaaaactgatggtgattttagacggaaaaggcgacggcacttatatcggcgataaagacctgtcctcagtgaataatacacggcaatggatcatgtttcattctccgatatcaggggaaatcatcattgatgggggagcggagcaggcgatgatccataacgggtcaagtctcctcccggccggcgtcgccgatgtctgcggcagttttccgaaaggggccgtagtggaagtcaaagggcccggcggcatgatcggcaaagggcagacgcagtactcatccgatgaaattttagaagtcaaagggaagcggagcgaccagctttcaggaacgaagcaggtggaagtgattcacagagatgattgggtgaatttatttgacgagggggaacacaaatgagtgaagtattgcaaaaagcagccttggcaaaagaagcggctgccgaaatggtcatgaaaacgacggctgaaaaaaacgaagcgctccaatgtattgcagacggactcagaaatgaacgccggctgattttaacagagaatcagaaagatattgaagcgggacggaacggaggactgacacctgacattattgacaggctgactcttgatgaaaaacgcctgctcgatatcgcggacgccgtggaactgctgatcggtcttgaagatcccgtcggtgaatcgctggagaccattcaaaaagagaatggattatccattgaaaaaatccgcgtgccccttggagtagtgggcatgatctatgaggccagaccgaacgttaccgtagacgcggccacactctgcctgaaaaccggaaacgcggttgtgctcagaggaagttcttccgccatccacagcaacatagcgcttgtcagtgtgatgaaacgcgctctggggctgtcaaagcttccgattgatgccgttcagctcatagaagatacaagcaaagaaaccgccaaacagctatttacattaaatgacgggctggatgtattgattccgcgcggcggtaaaaatttaattgatcttgtggtcagggaatcaaccgtacccgttttagaaaccggagcgggcaattgccacgtgtacatagatgagtcagcagatcctcaaatggcaagcgaggtcgtcatcaatgccaaaacacagcgtccttcggtctgcaacgcgattgaatctcttttgattcatgaaaaatgggccgaagaacacgggcgaaagctgctgaatcagctgacagaaaaaggggtggagctccgaggagaccaggtgatttgcggactggagcctcaagcgaaacaagcagaagaagccgattggggagcggagtacctggcgccgattctcagtgtgaaaacggtgcaggacgtacaggaggcggtccgccacattcagcagtacggcacaaaccattcagaagccattctgacggagaacgccgagcatgcggcttacttccagaccgccgttgacgccgccgccgtgtatcataatgcttcaacccggtttacggacggttttgaattcggatacggagccgaaatcggcatcagcacgcaaaagcttcacgcgagagggccgatggggcttccggcgttaacatctacaaaaatcatcatcaaaggaaacggacaaatccgcgtatagtcttttaagcttatccttcaaaaagggtaggctttttttatgcggaaagattgacggtctctattatattgtgtaaaattaaattgtacacaatataatagaggtgaattcacatgacaaaaccattatttactgcaaccgtatcagccgccggcggacgtgaagggaaagtcacgtcttctgacggggtgctgaatcttgatgttgccatgccgggaacgccaagagcaaaaaagctcgaacatgctacaaaccctgaacagctgtttgccgcaggatattcagcctgctttgacagcgctcttcagctcgtagcgagaaaagagcgtctgagtattgaaacagaggtcactgcgcatgtcagtctgctgaaagatgaagcagaccaaggatataaactaggcgttacgcttgaggtcaaagcatccggcattgataaacaggagcttgaagcccttatccaaaaagcgcacggtgtctgcccgtattcaaaagcgacagcgggaaatattgaagtgaagcttctggcagcagaataaaaataaggatgcccattcggggcatccttattttttgccgtgcagcgtattcaaaacctcataaagcgactgctttaactgctttaattcctcttttgaccgtcccgtctgttccagcatggcaatggggatatccgccgctgttttctgcaaggcccgtccttcatctgtgagcctgatcgtcacggatcgctcgtcttcagccgaccgctttctcatgatgattccgtgctgctccatccgtttcagcatcggtgtcagcgttccggaatccaggtacaaaagctcacccatccgtttcacattcagttcttcgtgctcccataataaaagcagcgccaaatattggggataagttacgttgagcttatcaagcagcggtttgtaccgtttcgtcatttcccttgagcttgcgtacagcaaaaaacaaagctgattctccagtttcatatgttcaaaatctttttctgccattacttctttcaccaactctttgtttgttaacgttacccctattgtagccgaaaaacagtccatttcctattcctcatgtttaaaaatatgagcaggggcaatatatacagtaagtacaatgaggaggctgataataatggcattatttactgcaaaagcgaccgcagtcggcggacgggcaggacatattaaatccgaagacggggtgctggattttgacatcatcatgccaaatgcaaaaaaagacggagaaaccggcacaaaccctgaacagctctttgcggcaggatatgctgcctgcttcgggggagcgcttgagctcgccgcccaaaaacaaaaaatcgacatgacctctgaaattgaaggacaggtcagccttttaaaagatgagagtgacggaggttacaaaatcggcgtaacgctcgtcattgatacaaaagatcttgacaaagaaacggcggagaagctagtgcacgccgctcacgagttctgtccgtattcaaaagcaacaagaggaaatgtagacgtcaaacttgaattaaaataattcaacgaacgaatatcccggattttatatccgggatattttattaacgaaaacatcagtaatgatctcttctctcccggaataagaatacgatatagcacttttgcataatgacaccaagagaaaagagggagaaatcgatgtctcttccaaacataccgaacatcacccccgacattacactctccagatgtgagaccctgaacctccttctttcatccgtggctatggaagaaatcggactatcccatattctgcaggcggaagcggaaaggattcaaatgtttctcggcgcttccggcgatccctccttggaggaattgtcatcaatcaatagaagcactgaacggctcctgcgcaccgtcatgaaatcacaactccttttgcagacgaagcttgaggacattatcttcttacaggattctgaagtctgtatggatccggacgacccgagcaatccgagtgatccgggcgatcctgatgacccgtggaatccggacgacccgagcaatccgagtgatccgggcgatcctgatgacccgtggaatccggacgacccaagtaatccgagtgatccgggcgatcctgatgacccgtggaatccagacgatcccagtgatccggaagatccgtgtgacggcctgttttacggccgcattggctgctgtgagtgcggggattgtgaggactgcggttggaagaaaaaaggcggggagcgttcataaaaaaagagacgggtgaagcatatgccgtattcaagcatctcaaaagcgaaacaggcatcttttgaagctatgcattgtctcacgattgcgctgttacatatattatctgtgaccgtggataaaagaaggggttcaaattacaaagaagaaatcaggctgttctccgcattgtgccgctggcagatggaaacaggcggccgtctgtttttaatgatcagcctggaagaagagcagaagcagatgtatgagcggcactttcatgagatgaagacagtgacggaacgaacgaaaaaattcatttttgaaagcccgcgcgaattccgggcgcatcccattacgaagcgggctgtcaggcagcttcaggaatggaatacggaaactgccgaacctgccgtcagatgggtgcggcctgtcatcatcacgatgaacggcactcctgaacggccttggttcaatcaacaactccaacatcgggaaaggtgagaaaatgagcggaaatgctgaatgtaaactgactctttgcatgattgtgaaaaacgaggagagatacatctcccgttgtttatcaagtgtacaagacatcgctgatgagatcgtcattgcagacaccggatcacaagataatacaaaagatatatgcaaaagctttcaggcaagagtgtttgatttcgaatgggagaatgatttcgcaaaggccagaaattacgccctgcagcatgccgaaggggattggattttagtgcttgacgcggatgaagagctcgatcaggagacggcccgttttttaacttcgctgcttcatgacggattaccgagccggggccttttgaaaatcatcaattatacggggaagcagctcgatgaaaacgaagcgtttgaaagcatgcagccgagactgttccgcaatcataaaggccttctgtatcaaggcagaattcacgagaatatctcggcttccaatgaggaagaaaacaatgcttttttcacgctcccatgtgtgattcatcactacggctacttggagcaggaagaaaagatcaagcaaaaacataaacggaatatcagcattttaaatgaagagctttcagaggaaaatcctgatccgtggcttgtctatcatttggcaagtgaatgctacagaatcaaagactatgaaaaagcattacatcttgttaacggctcaatttttcaatttttaagcgaaaaacgaatgcctccgtctctcctgtattatttgaaatatacaatattgcttgagctcaaacggtatgaagaagccgaacaagggattgaaaaagtgctcaagctatatcctgattacagcaatcttcattattataaaggccttgtattatatcatttgaaaaagtacagagcggcaatcaaagcatttgaaaacggaacgcaggttgaaggagaaaacgctgatcacttcattttaaaaggtgccgccaatttcagagccttttattatatggcgaaatgccatgctgcattaaaccatgatatgacggccatcgcttacgccaaaaaatcggtgaagttcaatcctcaatttaaacccgcgaaagaacttctgtctcaattaaaaaaggatcagcggacaaacgcctgatcctttttttgcatgttccactaagataatcgaataatgtttaaagctgcaccgacgcttcctccaagcaatgtggccgcacccaataatccgaacagctgaagctggattgtgctgcctgctggcaaagtcacaataaaggagttattaaagtttgccaaagacgcgaccggggcgataatcgaacttgcaggaggagtgccgttgattaaaatacgcgaacttacaagcaagccggccgttaaattaatatggtaggaaatatagtaccgtcccgccggagcaacggtaaatatggtatttgcggcattagccgtaatatctgccgaaaggttttgttcattcggtaaggaaatggtcgtgccgccgacaataactgcgacaacaccgccgcccgtattgctcgcatagccggaagttgctgtcagacttgttccggtgcttccggttggtcccgtgccgccagtagcgccggtgattcccgccgcagctaaaagtgtatagtcagctgaggctccaggggttcccgccgggctgtttacgtttgcgacgtaagagcttccgttatacaagacaacctgtccggttgtgtaagtgggggcaatcagcggattaaaagcaacaatcccttgaaggcccgcaccggtgacccccgtaggtccgatcgatccggttggccccgtcgctccggccggtccgattgctcccgtagatcccgtcggccccgtagcaccagtcggtcccgccagtgtagggatatttgagatactgtccaattttgaaccgagaagaagctcctgtttcattaagctgtcaagcgtatcccggacgctctcattcaggttaagaatatccgcaagacttgacgggggccctgttaatccgggaatcgctccgagcgcgtattggattttttcaccttccgcattcagaatatgtgccattcccagctcttccatagcaattgacgaaagaagaaggttaatggtatcgtctctggaaagtgtaacgacaggggtgatattgggcaaattaggctgtgacacaatgtccctccttatgagttggctgaaaatcattttattacgaacaaagttccccgaaatgagcgtaagcagtactgtatcagtatattcacggattctgtccaagtttctgaatggattccctttataaaccaattgagcgggttataccgctgtttttgatttcatcatatatgaaggaaatactttaaatatagagaaaatacatcgcacagcattcgcaaatcggtcaaaatgacagcgggacatgtgatcgtctataaagcgatggctatatatcttgtgcgtttcctgcaaaaactctctttttcatttcaagttttctgtataaaagggcgagaagcatggaggggatcgtacaaacaatcattccgataaaggcataccggggttcaatttcatataaaaaacctccgaaaatagtaaataccgcagtgctccagctgagagcaagcgctgaatatatgccttgggctttcgggatttgcgcgggtgaaatatttttaattaagtatttcataaatgcatagtgtcccatcgcgaatgaacaggcatgcagcgtctgcgcaatacagaaaatgatgacatgcggaaatgcaaatacgagtatccagcgtacggtagcaccaagcgccgccaaggcgagcaaagagcctgccgtaaattgatgaaagtatcggtcagcgattgcaaagaagataatctccgcgataacggcgatgttgataatgattccgatggcataagcgggggcatcgatttcctgcaaaaagagataaccgtaattgtaataagacgcgtgtgccgcctgcagtaagataacgattgcgagcaccagaccgaaatatttgatgcggaataaagcaaacatgccctcttttcttgcgcggtctgtttccggccgttttgaaagaacagctggcgcatgcataaagctgaggcatgcgaatatcagggtgcccaaaagcagtgcccataaaatcgcttgatctccgaatatacctgtaaagacggacaggatgacgccggctgaaacaaaacccgcggacccccactgccggcttgtcccataggcctttaattcgttatgctgtacaaggacgccgcaagcgctgtctaaagcaggcattaaagcagggtaaaacacatgcagcactaatgtgacaagaagcaggctttgaaaagaatcagcgggaatataacataaaagtgcgagaagcgtcccggttctggcgccgtttaataaggctttgctgctgaattttcctgataaataagggaagaaaaataatgtggaaatccctcttgccgccaagcccaagctcataatgaaactggcttcgggtacggaaaccccttttatatgcaccatccatcccgtccaatagggcagaaaaacaccccatgtcataaaaaaactaaaaaaatgcagactcatccagcgatatgctttcattcccgttcctcctttaattggcatgttatcatgtaaagacataaagacaatatgagatatctcatatttttggggtggacgatggaaatttataaaggcgagaaaaagcggcatcagttaaaaaaacactcaatcgcgcatttattctctttccccgctgaagagtttatggaagtgcgcgaatatgagcgggacgaatggattattcaagagggcaggaggcctgacttcctgttttacgtgattgaaggaaaagcgaaaatatatgtaacccaccaaaacgggaaagtttctttaattaattttatcaacaaaaatgattacatcggagagatggaactattacatgaagtgtattacacaaaaggaattcaagcctcagcgaagactgtttgttttgctctgcctattaaccgctgccgcgcgcaattgctgcaggatgcgaaattcctgcgtgagttggctaagtttttaagtgctaaggcgacgcttatggcttcgaaatattcacaaagtctggcgttcccgcttgaaaaccggctggccgattttattttgcagacggcttatgaaggggtttataaagagaagcacgtaacggtctgtgattatttgggtgtatcttaccgtcatctcttgcatgtgctgacgcaattctgccaaaaagggtatttgcaaaaagaagggcggggctatcaaattaagcagcatgattcactaagtgaacttgcggaggcgctgaagaataagtagcacgcccagaaaaaacagccacccgcaagttacggatggctgttttcattatacaagctgagcttgtttttttcgtgcctgtttcgcggcgtcgaccatattttttaatgccgcaacggtttcttcctgctgtcttgttttcagtccgcagtccgggtttacccagaagcggtcagtcggacacacttcaagcgcgtcatcaataatttgatagatttcttcagttgccggcacacgcgggctgtgaatgtcgtatacaccgagtccgaggcctttcacgtaaggatgttctttcaagtattctaaaaatcctccgtggcttctgctgtgttcgattgtaatgacatccgcgtcaagatcattgatcgtatctacgatatcttcaaagttgctgtaacacatatgcgtatgaatctgcgtctcattttgcacagaagacgtcgttaaccggaatgcttctgcggcccaagttaaatattcatcccaatcctgcgtttttaacggcagtccttcgcggagcgcgggttcatccacttggataatctgaataccggcatcttcaagcgcttttacttcttttctgagggcaagcccgatctggaaggcgatttcttttcttgaaatatccacacgcgggaatgaccagtttaagatggtgacaggtcccgtcagcatgcctttcatgtgtttttccgtcagcgattgggcgtagaccgtatcttttaccgtcatcggttcgataaattcgacatctccgaaaatgacaggcggacgtacgcagcgtgaaccgtaagactgcacccatgcatatttcgtaaaggcgaatccggccagtttttcaccgaagtattcgaccatgtccgtccgctcaaattctccgtgaacgagcacgtctaagccgatttcttcctgaatgtcaacccagcgcttcgtttccgcattaataaaggcttggtactgttcatccgtccaatcttttttgcgccatttttgccgtgcgctccgcacctctgcagattgagggaagcttccgattgtcgtcgtcggcagaaggggaagaccgagtgattcattctgcagcgccaatcgttcttcaaagcttgccggacgggagaaatctttttccgtcagctgattcagctcttctttttgagctgagttcgctcctgttgcgaatgcttttaaagccttaagtgccgcttttgcttcttcgatctgctcactgacggccgctttgccggacagaagcccttcttttaagacgccgagttccgccagtttttctttagcgtatgacaggccgttcagcaaatccttttcaagatgctcgtcagggtgtttcgccaccggcacgtgcagaaggctgcttgaaggctgaatccataactcctcaacatcagcgtggctgaggatatccagagccgcgtccaggcgttcttcaacatcgattttccaaatgttgcggccgtcgatcacaccggctgccagcactttatctttcgggaagccgtgctttttcagctgatcaaggtttctgcctttatcatgcacgaagtcaagcccgattccctgtacgggataagaaacgagttcttcatatgcatcaaccgaatcgaagtatgtctgcaggaggacattcagtcctgaaagctcttttgtgatcgcttcatagagttcttttgcggcacggacgtcttcagaagaagctgtcacaagggccggctcatcgatctgaacccattttacgccttcagcttcaagttctttcagcagctgcacataaagaggaacaaggcgtttttgaatcgctttcgcttctgattcttcgtatcctttcgcaagcgtgacaaatgtatacggaccgacgatgacaggttttgtttccgctccgaattcttctttgatccggcggtagtcgtcaagctgtttgtttctcgtcagacggaattcaatgctttcgtcatattcagggacgatgtaatggtagttggtattaaaccatttcgtcatttcactggaaacggcgtcttttacaccgcgggcaatcgcaaagtatgtatcaacgggatccgtgatgctgcggaatcttttcggaatccagttaaagctgacggctgtatcaagcacatggtcataatgggtgaaatcagagaccggcacgatatcgatatgttggtcaagctgtgttttgacagctgataagaataaaccgtcaagttctttaagaaacgtttctttgtcagtgtttcctttccaataagcctcaagcgcttttttccattctctgttcaagccgattctcggaaaaccgaggttcgaagttttgattgttgtcattaagtttcctcctttaagtgagatgtaacaaaaaagcctctttctcatgagagaaagaggctttaacttcaaaatgcaagcctctcttatctctcagatcacgtctgatggaattagcaccgtgccttatgagacattcgtctcggcgcaaaaatcacgcgccccatttcacaatggaattacggtcggttgctgttggggtcaaaaggccaatccctcgcccaactctcgataagagaaaatatttcaatttttttgaaaagttacatcatttgttggttatcttatcagtttattcagatcactgtcaatagaaaatctcacattttaaaaattggtgatgcgacaagctgatcaatcattatatgagaaaaatatcagaaagacagcagctgtgcctgttcggctctttccatcagcacttcaggcgcgtctaaatacaggaatccgttcccggccaatgttttggcgatgtccaaaggaagggtccgccgcacgagctgggcgtagacttcagcctcagaaagcgtccgctgaaacgcgtcctgttcaagcccttttattaaggcaagcgctccgctcacatgcggggcggccattgaagtgcccgtcagcttcccgtatttatggttgggaagggtggagagaatattttctcccggagccaccaggtcaatctctttattggcgtttgaaaattcagacgatttacgggcgattgagactgatccgactgcgatcacttcgttgtaagcggctggatacgacagttcctctgtacgttcgtctccgtcgccttcgtttcctgccgcgcaaacgaccagaacaccgctttttaccgcatttgtgacggcttctttcaattcaggcacatcgcttggcccgccgagtgacatggaaataatatcggccttttgttcaacggcgtagttgatgccgttaatgatccattcgtatttgccgctgccgttttgaccgccgagaactttaacgattaaaaggcttgcttccggcgcgacacccgaaattccgccgtttgaatcattggcggcaatcgttccggaaacgtgtgtcccgtgtccgttataatcggaaatcgcgtcttctttgcctccgtcatcatcggtgaagtttttcccgccgacaatccggtctttcaaatcaggatgattgatgtcgcagcctgtgtcaagcaccgcgattttaatatccttgcctttaaacccttttgcccacaactctggcgccttaatcactttaatcccctctggaagctcgttcacctccatgatctgttcatccgtgacataaggaatcaaatgcatttcaccattcataaaaaagccctccttttttatgcttgcgagtggatacaagggtgttgctactattttatggcagagcatgccggccggaaagagtcatttgaagcattttcataaaaaaggcgtaatctatcgcactaaaaaatttcaaataaatggatagtttaacagcttttattttcattcatgatccgctgacggtataattggaaatgggaaaggagaagagatatgaagataagtgaagcattatacaactatttttcagaacaagtggatcaaattgcgaaagagtggatcgaaacgatggaagattcggatccgaattcgatttattctttgacaaatcccgtcatcacagaagaactgacggagcaggataaagaattttaccggcatattaataaaatgtatatcatgccgaaaaaagaatttttagaagagttcgagcagtgggtgattgagcttgcgaaagaccagaagcatctggatactcccgtacagtatgtggtccgtgaattcatgagaaaccggagactatacatcagttattatgatgcgtttgccgataaacatgaatcttcgtttgcacagggagaaaggaagaaatgggagaatttaattgtacaagtatttgattttacgatttacacgtttgtcgatcatgccgagcataactcaaaaatgcagctgaatgcgcaaagagaaatgattttggagttaagctcgccggttatcacgctgagcaaacggacggcgctgctgccgcttgtcggcgatattgacacggagcgcgccaaattcattcttgaaaatacgctgagcacatgtgcaaaacggctgattgaacatctgttaattgacctgtcgggtgtagtggttgtcgatacgatggtggcgcatcagatttttaaattagttgaggcgctgaaattgatcggcgtcacgtccactttatccggaatcaggccggaaatcgctcaaaccgccgtacagctcggcattaatttctcagatattacgatcaagtccaatctcgctcaggctctcaattatcatcaataacatacataacaaaacaggctgccgaatcactccggcggcctgtttttatacaaacaacaatgaaatgagccagcttgcgccgaataacagaagcacgagcaggaaaaagcaccagtcggcgcggcgcacggtaacagttctgtaaaacgtgcggtttcggctccccgtaaagcctttagattccatcgcgatcgccgtgcgttccgcctttctgattgcgcctgccaatagcggaatggtgaagcgcctgaaggcggagagctttcctttcagcccggaatcagaccccgcgcccctgattctgtgcgcctgccggatgatcaggatttcatctttcagaagagggagaaaccggaaccccgcgataacgccgtatgcaagcttgggcggcagcttacactgctgaatcagactgagcatgaacagaatcggatcggttgtgaaaagaaacatcatcgacaaagcggaaaaacataaaatacgaaacgcgatagaaatcccgagcgccgcgttatcactgttgacggcaatcggcccgagcttaaacagcaggttgcttccggttgtcgggacgtttccgaatacggcggctgtccataaagaaccgaaggccagaatgacaaacggaatcgtgaacagcagccattttttcagcggcacacgccccgccgagaggacgcctcccgcaatgatgatataaaacaaagcaggggtgtacggattataaataaacgacagcataatgacgcataacaatacagccgccgcctttattgacgggttaacagcctccagccgcaagttcatttctccgcctcctgtcgtgtttcatccattcataccgcaggggcaaagccaaatgcgcccgctccgcgattccgatatgatcagaaaacaatgagtcgggcgttccccggaataccagtttcgtgccgcagagcacaaggatcgtgtcggcataatctgagacgagttccatatcgtgtgtcaccatcaaaacagccgttccttccttttgaatctcacggagcatttgcatacactcccgcgccgttttggcatcctgtccgaaagtcggttcatcaagcatcaaaacgttcacattgtgcataagcatcgttgcgacgctgagccggcgtttttgtccttggcttaaagaaaacggatgctgtgaggcatggcgtctcaggccgaatcgggttaacagctgaagagctttctcctttgcggctctgctgctttcaaaaccgaacatcagctcttgaatgacggaatctgtgacaaactggtgttcaggattttggaaaacatatcctatcagccgccgcagctctttttcagaataggaatcaatcggtctgccgtctattttgatgtctccgcccagcggacggatgagcttggccgcggcagacaggagcgttgtttttcctgttccgttagggccggcaatcgcggtgattgaacctttttttacggaaaagctcacatcttgaaaaatgacgtctgcccctcttgagaatgacagctcgtgaacgctcagcgcgtcttctgccgaaagcgcggcgggccggggttcgggcagagatggtacaggttcgtgaaacagcttttctttacacaatgtaaaaggaatgctgacgtgctcctgcaatgagatcacacgcggaatcggaatgccgagctgcatcagctcttcaatctttgtttcaaagataacgtccgtctctccgtccatcaccttctgacccgtttcgtcaaggacaatcgtcctgtccatccacggcgcccaatgatcaagctgatgttcgataacgagaaggccgaagcctttttttgcttgaagatctttgatcagccgcactaattcacgtgcggaatatggatcaagctgtgccgtcggttcgtccaaaataatgagttccggttccatcgcaatgatacaggcaagcgccactttttgttttgaaccgcctgacagcgaagcgatcgttcgcgttttcagatgagtgatctctaattttgccaaaacgtcatcgatgattgcgtccatatcttcttttgtatattgcaaattttccaggccgaaggcgatttcatcttcaaccgacagcatgcaaaactgctggtccggatcttgaaacacgacgccgatggatctggcggcgggctctgtcagatgtgaaagaggtgttccgtataaagaaacggttcccgattgaaccccatcgcatgcttccgggtacagaccgtttaaacagagagcgagcgagcttttgccgcatccgctcggcccgagcaataaagcccgctctcctttccggagctgaaaggacacgttttgaagaatcggcttttcatcctgatcataagaaaaggtaagacggccggccgatagaaggggatcagatgcctgcatcttggttcacctgtttctttttcttcttgaattgttttccgagcgccatgccgttcagcactcctgtgtaagccagcgcatcactgattgctttgccgagaaggccggcaagaagcgcacctgagaccagacggatgagaagcatgacggctaataaacccggattcaatacagagtatccggaaacgaacaagtcataaatgaagcttgtcacagaagaccccataccggataaaagaagcacgggcagggtatacacccgccagcgtgtcgctaaaaagaccgcttccgcaccgattccctgtgcgatcccgatcagaatcaccatcggtcctgacggatttccgagtaagcactccacaaacgcggcgatgatttcagaaacaagagccgctcccggtttttgaataatgtacgcggcaatcaccgagacgataaaccagataccgtaaatcggttcgtagctcatccggccgaaaaatcctgccgctatattgcttgcatgagttgatactaaataaatgacagcaaatacaacactgatgacggacatgacgacaatttctctcattttccaatttttcattctgatctcctgctttcttatcggatagtcgtatgtatgaaagagttgattttacaggcggtttatattcagtttcatattgcggtgtcctcccccgttttttaatgaaaaataaaaaactgcatatccgagggaatatgcagcagcagaacgaaaacgcatggggaaaaaccctgcgctccggtcaatctgcacttccccacgctggtattatccagatcgggttataagggatcaaaacacgcctgccgcatgttttatctcagccgataacagcacccctagtgcgtttcctatacagttttttatgatgacatcatcatagttgatcatgtctgatttgtaaacagcctttctccaacagagtttggaatcggaccggatgatcattcataaagataagaagagcccttttgatcaaaaggaaacggaggacatctatgtttgttcatacagtgcagtctggtgactcgttattttccatcagcagaaagtacggataccctgttgacagcatcagaagcgtcaacgggcttgaggaaacgaatatcgttccggggcaggcgcttttaatccctcttaatgaatatacggttcagccgaatgatacgtatgccgttatcgcaggtaaggcttatgtgccgcagatgcagctgatgcaggcaaacccggatattccgccgaaccggctgcgggcgggtatgaaagtgaagattcctgatatctctaactatcttgcgggcaccctgcaattttatgtcattcggacgcctgaagcggatagagagctaattaatgattttgcgccgtattcttcggcgatttctttgtttgaatatcattttggcccgaatggagatatcattaacgatttaaacgacagaaccgcaatagaaaccacatggcagaacagagtgcgcccgcttgccgtcattacgaatctgacagaagggggattcagtccggaattagcccatcaagtgctgcaaaatccgacggtaagaacgaatctcgtcaacaatatcgtctccttaaccgtaagaaagggatacggcggtgtaaatatcgattttgaacggatcagagaagctgacagggacctcttcacaggatttctccggcagttaaaaacccggctttcagagcatcagctcgcgttaacgatatcggttccggcaaaaacaagtgatgcagtgccgtggctgaggggatatgattacggcggaatcggagccgtcgtcgattatatgttcattatggcgtacgactggcaccacgccggcagtgagccgggacccgtggcgcctttgacagaggtcaggcaaacgatcaattttgccatcagcagggtgccgagaagaaaagtgattctcggtgttccgctgtatgggtatgattgggtgattccgtaccgtccgggaacgatcggatccgccatctccaatcagcgcgccatggaaacggccatgaaacatcaatcagtgatccgttattcccagcaggagcgttccccttacttccggtatactgatgaaaatggaagaacgcatgaagtgtggtttgaggatgtgcggagcatgagtgaaaaaatggttctcgttcgggagttcggactgcaggcgatcggcgcgtggcaattaacgctcggtttcaaaccgggcccgtggctgcttaggaactttttcacgatccgaaaaatatagctgcatgtcccgctccgcaagtaatttttttcctatgataacgggtcttcttttggacaatctaaaattgaacaggaggtctgtcatatgaagaaaagggaagagcagtatatcaacgaggctgagtatgtaccgcatccgacaaaagaaggggagtacgcgctcatgctgcatgaatcctatcatttcctttcagaagaggatgaaagcgatttgccggaataagggctttatgcctttattccgtttattttataggcatgtgctgaaatcacaaatttaaggttgacacattccttttttttctgtaatctcagtgtgtcaattcaaataagaacttcgttaggtgaggctcctgtatggagatacgctgctgcccaaaaatgtccaaagacgccaatgggtcaacaggaatcatcgacataaggtgattcttaacgcagctggatggctgtcctatgccatacagtgctaaagctctacgattggaggccccgcacgtttatttgccgtgcttgttttcgccttcatatcagaaggttttttttatgcctcaaaacgtacacgactgagcatgataaggaggtgcggagtatggattctccccattcgagtatgtcagaagaagtacccatatacagccagataaccagtgacgacatgatgaggagacaaaccgccgcacttcccttgacggacggcgcgtctccgtaaaggaggtacgagtcccgatggtccaaaacatgacctatgacgaactcatattacgcattatcattttattgcgggacggaaaaataaaagaattccgaaacatgatagatgagcttcagccctatgacatggcatttttgtttaaagaaatgccggaaaagcaccgggcccgctatctgtcatatatgacggttgatgacatcaccgacatgatcggagagctggagcgggaatttcagcttgccgttttgcataaagtcggtaaaacgaaagccactctcgcaatgaataaaatggataacgacgatctcgccgcattgctggaagagatggatgaagaactgaaagaacagcttttatccagcatggaggctgaggaatcaaaagccgtacagcttttgatgaactatccgcaagaatcggcgggccggatgatgacgaaccgcttcgtctggattccgcagcattatacagtaaaagatgcggtcgtgaagctgaaaagctttgcagaaatcgcagaatcaataaattatttgtacgtgattaatgacagcaagcagcttgtcggagtgctctcttacagagatttaattcttggcgagcctgaggataaagtgcaggatctcatgtttacacgtgtcatctcggccggggtgctccaagaccaggaagaagtcgcccggctgatccagcggtatgactttttagccattccgatcgtggaagaaaatcatgtgcttgtcggtattgtcactgtcgatgatattattgacgtcgtgattaaagaagccgatgaagattacgaaaaattcgcagcctccggtaaggcgattacatttgatacgaaagcgtacgttgcggcgtaccgccgtttgccgtggctcattctgcttttgtttatcggattgatttccggaagcattctgaattattttgaagatacattgcaaaaagtcgtcgccctcgcgtttttcatgccgatgatcgcgggaacgacgggtaatacaggcacacagtcactcgccgtcgtcatcagaggactggctaaagaagaaatgaataaaaaaaccatctttaaactgattttccgtgaattaagaaccggtatctatatcggcatcgtctgtgcgatcgcgattacgattgtcgcaaccgtctggcagaaagacttaacgctcggttttgtcgtcggttcatcgctgcttgcaacgttgattatcggtacgatggccggaacgatcgtccctattattcttcataaattgaacattgacccggcgattgcatcaggtccgctgattacgacgctgaacgatattttgtccttattaatttatttcggcattgcaactgcatttcttcatgctttataaaaaaagtccgtctcacaggaggcggacttttttgatcagcggtttttatacttaaaatgagcattaagctggccttccagcatttttttgcggagctgcgggtcgtttttgagagcctgttctttttttcgcatgtcttttaaaatctcagccgtctgcacgccgtcttcccgcttgttggcaatatccatcagccgctcaacgtccgcgaaggaatactttctcgttccccgtgatgaacgctgcgggtagattaatttccgttcttcatagtatctgatctgtctgactgacaatccggttaattcgcttacaatgccgatcgagattacttttttatctttgtaagattgttcgtctgtcgtcatttttccacccctggatgtcttttactcatattatataagaaaaaaagagaaaaaacctgacgcttgtcaggttttctgacgcggaatagaaaattttagaaaaaaagcggcagaaaaattgacaaggttaatgcatggtcctgtgcccccgttttatgcttactatacagacacaatgaggaggaaggataggaatggagaaagaaaaagcggtttcgctggcaaaagaaatcattgaattagatatgaaacgcgatgaaatgctggaggcgttcatgcagcttgccggggaacacgcttttccgctgctcagagccgtccagaacggactttaccgaaaaacatcataatctacagaagttttacaatggctttatacgtctttgatataaaagcgttattctgatcatagaataacggaaaaacaaaggaggccgccatgagtcgtttgcttcaaaatgcattggacaaagagagaaaccattattccaaaaagcttctgcagatcggagtctatacgaaagaaatactcaattccatgacaattacggagctgagaaaggaatacgcgtatttttttcggaacattccctataaagaacggaacccttatacaaattaaatgatgtataagggtatttttttatataaaaaagaaggaattctgaaaaacggcacgaatagaatataaaacaaagatcgactcttatgaattgtaagggtttacattatttttttataaaaatcttaaatacggggtagatatgatgagattatcatttaacgaagaagaagtgatgcgttcgatgaatttgtacaaagtttttgcaagggctttcaagagtgtgtctgaacacagcatccgcgacagtaaagaacacggttttaatccgactgaatttgccgttttggagctgctctatacgagaggaccgcaaaagcttcagcaaatcgggtcgcgtcttttgcttgtcagcgggaatgtcacctatgtcatcgacaagcttgaaagaaacgggtttttggtcagagaacaagacccgaaggacaaacggtctgtttacgcccatttaactgataaaggaaacgagtatttggataaaatttatccgattcattcattgagaattgcgagagcgttttcaggacttatgcctgaggaacaggaacagctgatagccttactgaaaaaagcgggaattcacagccagcatttgcttttccgttaaaagaaagcggatacagacactcttcttcacgaagagtgttttttttctgttccggacagtagagcctgaagcggtttttgcataagctgatacaggtcggcatcattatttaccaatcataatgtgacacgccccatgccaaaatatgagggtgctttgattataaagaaggtgaacatgtgagaagctgtctgctgtctatatggtacttacttgatccgctttatttcttctttacccggctgacgctgattgataaacggcaatcgaatgtattccgcgtccgtttgactagatataaaggaaaagatgtcatcctgagcgacggaaccagaattaaaaaaaacgacgtgttagttaagattcatcttcataatgtcaaactcctgaaagagctgcagcctattgaaagcgcggtcagaagggggattatgctatatcagaaggtatatcaatccatgcctcatttagcggattatattaaccagcataaacggaaagacgagattaagggagtcgtcggcattacaatgcttcataaaggagctgcgagactcggttttgatgtgataaaaccgtccagcggctgctacaggctgtttaagaaagcggcccatattccgattttatactttactgcaaaacagctcaccctcaaaaacattccttactcctgctatttatttatttccaaagaaaaattgatgtgcacgtatcagactgaaaagagctgacaaaaagcgtcagctctttctcttgatttgctcaagcacgattgaaagcgggccgtcctgcgggttccggtaaaaatcataaaacggatctccctctgtcctgacgcggttcactactgtatcgatcgtataatcatcaggtgttaaagaggagttgacttcgctccaataaaggggagccgcaaccgttcccaattcgttgccccgggtcgaatagggggcgataatggttttcccttcggcatgctgcaaataatctaggtagagtctgccgtttcggtttttgataaaccgctctgtcgtaaaaagatccggccgcgtcctgacgcaataatcggcgatgagcattgtgaacgcacgggtttcttcataggtgaatgcttccggtgaaagcgggatgtagagctgaatgcctttatttccggagagcttcgggaatgacgtaatgctgaatgagtcaaacagctgtttcagcacatgcgcagcctccactgccataggaaaatcattccttgacggaggatcaagatcaatgacaatctctgcgggcctttcagaatgcactgtctgaaacggaacgtgaaattcaagcgccagctgattagccagccataaaagtgacggtatgctgctgcatacgatgtgctcgtggctcccgtcaaacacgcttgagacaaagtccggcgtgtagtccggtttgtttttttgaaaaaaagattcgccaggcgcgccgtgcggataacggatcaccgtgacggcccgatctttaagaaagggcatcagaaaatcgctcattttcaccatataactaaggaaatctgctttcgttttttcacgttttttaaaaacaatcttatccagacttgtgaactgcagcttcggcggcagcgttttagagtgaaggataagctgttgatacgtgcattccgtccaatccatttcaaactgaaaagacacaaaagatacttcacgcagcgtgtcctgcaatatggttaaatactgcacggtcatgcagatagaaggctcaagtgtatactcgccgcttttttgtttttttccgtgggtctccataatggttctgacggcgtttttttcttccgcctgcatgccgtgggaaacggacgcgatcgggacggcgatgccgtcttttaaaacagaggccgttacatacccgtttttcggattaaacccggttaatagcacatgtgccgttttcatatgtttatacttttgccagtcgggagaccgtttattttccgcccagccgctggaagccctttttgctacgataccttctccgtcatggcggacgaccttctcccaaagcgcatcaaagtcagtgtgttccggaatgtattgaatcgcttcttccgctaagtgatgagggcaggcgggaagatttgcttctttaaacagtttggaaagggcgcgcttccgtttcacatacggtaatgaaacggtgcccgcgccttccagaacgaggagatcaaatgccagaaagcggcacggccgtctatcagcggtgctttcaattgcttccgtccgttttaaacgtccgcggatttgaagatgctcaaagtccgctctgtacggattgattaaatagacaagctctccgtcaagcgtaatggggaacctgtctttcatgtgctgaaaacaccgagccgcaaaagctgtgatttccggaaattgattcgtcagcgtctgtccgtttctgctggttaatgtaacgccgctttcgtctatgcggagaagacagcggaacccgtcatactttacctcatagcgccaatcactgccttcaggcggtacagaggtcaaaatcggctgcatcgtcagcaccatgattaagacgttccggctttttgtctggtcgttttctgctttttgcctccgccgcctgctgacgcggcgtcttttgtccgcgccggcgcagcctgttcgcgatccggccgcttcgtccggtcaatgcttgcctgaagcgcgctgacaagatcgatgacatcttcgcgcgggccggcagcagccggtgtcacgcccgcttcctcatgttcgagcttatcgttaattttagcgagaagggctttccggtacgtatcttcgtattgttccgggtcaaactcggttgtcagctcattaattaacgtaatcgccgtctgcagctctttttcattaacggctgtctgctcgggaacgcccggcacatgtccggcatttctgacttcatccggataatgaatggattccatcacgatacagttgtcatacacgcgaagaatcgcaagctgctgtttagagcggatcgtaatggaggcaatcccgattttacccgtcgtcctcagcgcttcccgcagaagtgtataggcttttgtgccgttatctcccggcccgacataatatgaccggttaaaataaatcggatcaatttcctgcagctggacaaagtcaacaatctcaaccgctttttcttcatgttcctgttttacgtctttcaagtcttcgtctgtcataatgacgtatttcccttttacatactcatagcctttcacgatttcatcaggctccagacttttttcacatccggtgcagattttttcgtatttaatcggcgcatggtcttctttatgaagactgcggaattttatatctttatcttcagtggccgcaaagagcttgaccgggatattgacgaggccgaaactgatcgaacccttccacatcgtgtgcatgaataaaaactcctttttgtctttattgtggataaacgggtccgttccatgtgtagcaacttatgggtgttgcggcgcttcatggagcggctgttccatttcctcaggcggaaatggtcggctgaaaagcaaatgaattctttatttacaatcagtgaatcggtaagttctttaaagcgctgaagtccctgaaaattatcagtggtaatcaaaaagattatacaaaatcattccccgggaaatgcccacgcattcccatgtggtgactgagaaaatttccagctcccatatgaactgaatccgcggtcagccgccgcttacttttccggagatcttaagtgatgtaaacgccgccagacaagcaatcaggagacaggcgggacgttgtattgcgcatgtcattccctcccgctataccgatctgaaacgactcacatttataacgggcatgtctaaaagatatttcagcctcaaggttttgtgttaaaatcattcttaagtttcggaatatagacgtaagccgggagtgatagatcatcgaagatttcatcatatcaataatagaggcgtttaaaagcttatcttacgccgggatttttttggcgctcagtatagaattcatcccggcggaaattgttcttccgctagcgggctattgggtctcaaaaggggatatgacacttgccgggaccgtgtttgccggttcgctcggcggtgtttcaggtccgcttgtcttatatggaatcggcaggctgggcggtcggccgtttttgctgaaatatggaaagtatatatggataaaacccgaatccctgcagaaatcagatgatttctttcagaagcacggaggtttggtcgcgttcagcggccgttttatacctggggtcaggacgctgatttctttgccgtgcggcattgcgaagatgaatgtctgggtgttctctctatatacatatgcagcgatgctgccgattacatttgcttacgtatacctcggaatgaaactcggggaaagttggaaaagcgtcggttccattctcgatcaatatatgctgccgctcggtatattcattgtgttgcttctcattctttggatgtttttaaagagaagaaaacagcgggccaaaacagaaaaaatttctcaatttgttaaaaaagttaagcgttgacaaatgatgaaacaggctttatcatgagcgtataaacaaatatttcttgaaatcccaaaggggagtagcgtccggatattccggaaacaaagtcgtcaattcatggatcatatccatcggctttgttggcatgccaatcattcatgtctagcaagacctttgccttatatcggcaaaggtcttttttgcgtaaaaaaccgccggtataagctcggatgatagaaaaaagaaacggagggaatggattggactttgcattattattggagtatggatgggttcttctcgttttaatcgggctggaagggattttagcggcggataacgcgctggtgatggctgtgatggtgaagcatcttcctgaaaaacaaaggaagaaggctttattttacggattggcgggcgcatttattttgcgtttcgggtcgctgttcgccatttcttttctggtgaatgtttggcaggtccaggccgtcggcgctttatatctgttttacattgcggtcagccatttgctgaagcggtatgtatttaaagataacgccggtcagaaaatgcagaaagaaagcgggttttggcagactgtcttgaaagtggagctcgcggacatcgcttttgccgttgactccattttagcggcggtcgcgcttgccgtaacgctcccgggaactcagcttcctgccatcggcggcttggacggcggtcagtttctcgttattttagcaggcggcgtaatcggtttaatcattatgcgttttgcggcatcaatgttcgtatccttactgaaaaccaggccgggccttgaaacggcggcatttgtgattgtcggatgggtaggcgtgaagctcgctctttatacattggctcatgaggaacttggtataattccggcagatgtcatccattcggcggcctggaaaatcattttctgggcggttctggctgccattgcggtttgcggatggtttatgtcaggagcaaaacaaatagagtctggcgcggaatcggaaaaaagagaacacgcgtaaaatgatcaaaaagggagtctggctttttaaaaagcaggttcccttttttgtttgaaacgcttacatttaagacatatgataacaattttataacagcattgttacaaaaaacacagagaaaacccccttaattctgcatgggggcacgaaatcatgtatagtacgtcttattggcttgtcataattgagacaaatgaaatcgatttctctttttcttcctttgcgaatccctactaaattagctatgattatgagtagttatagggaggaactgaggtgaaaccagtgcttagccttttgtttaaattgggaaaaaagaagcaaacgcttgaaacatctgttgaaaaaatacaaaaaggcgacaaagatctgcagaacgatttaatacagcaatataagccttttatcgcgaagacggtttcatccgtttgtaaacgatatatagatgaaaaagacgacgaattcagcatcgggctgatcgcgtttaacgaagccattgaaaaatattcggctgaaaaaggtaattcgctgcttgcatttgcagagctgattataaaaagaaaagtgatagactatatcagaaaagaagcaagaaccgctcagcatatcaatatggatgtgcaggaaggcgacgaccaggaatcttcgcagagccttatcgaagcggagctttccattgatgaataccgcaaacagatagaacaggaacagcgccgggaagaaattcttttttttcagaagcagctgaaagaatacggcctgtcttttaaagagctgctggaacaatcgccgaagcatacagatgcgaggcagaatgcgattaaggtagcctacacgcttgttgaaaatgaagagctggcgtccattttgcaccagaaaaaacagcttcctgtcaagcagctggagcagctcgtgtcggtcagcagaaaaacgatcgaacggaaccgaaaatatatcatcgccatgagtattattattaccggtgattatatttatttaaaagattatcttaaaggggtgttgcactcatgagaagagggatcatagtagagaaaaataaaaaattcgtcacgttgctaacccctgacggacaatttttaaaaacaaaaaatgatcaccgcacttgtgaaatcggagaggaaattacgttcgaaggcgaaacgcgtatgggaagaagggccagcttttttgattttttgaaactgcgcccttttaaattgggagtgtttacgatgactgctattattttgtttattttaattttgctcccggttttttctgataacaaagcttacgcgtatatgacgcttgacattaatcccagcattgaaatggctttaaacagcaaatatgaagtcattgaactgacaccgctgaaccatgacgccaaacaggtcatcagtgacatcggagattggaaaagcagcgattttaaggaagtcatcagtaatattattaccgattgcagcaagcatggatatgtaaaggaatcaaaagagattttaatttccacggtttatgaaaatacagatgacaatacatataaaaaaggcgttaaaaaacagctggccgacatgactgaaaaatataagggcacctaccaggtccaatcgcttgaatctgatatggaaacaagagaaaaagcaaaacaggaagggatgtcaacaggcagctacataagaagaaacgaaaagaaaacagaagaaaaacagcctgaaaagcaaaccgacggcaatgaaacagatcaaaaagataccgaaacagacgctgatcaaagcgagcagccggacacagaaaagccggcggctgatgaaaagacagctcctgatgaagaaaaggcagcagagaagccgggaaacaatgaaacaacgcccggtacggaagaagcgaagccggacagtcaggacggcaatcagcaaaccgaaaaaaatgcagcttccggatcagaggaaaacacacagaaggaacaagatggggaaacagagcagcccccaacacaaaatcctcaggaaaacggaaatgacaaagagcctaagcaaaagtattacaatcattactggaatcatgatcgcaatgaacattgggaatcctatcggcatcatgaagattcatcagaccgaaggaatccgaatggctaccggcacggaaaggagaatgccgataaatatcaaaattcgccgagaagtcccggcgaataagctgcattattgatttttcccgtttaattgtgattgagcctgctgtacaagacgttttgtcatttccccgcctacagagccgtttgcgcgtgctgctgtatcagagctaaggttcacgccgaattcttgagccacttcgtatttaaattggtcaagtgcctgctcagcccctggaactaagagtttatttctgctcgccatctttttcatctccttttctctggcaagatgtgttttcgcattttagtttcaaacggaacggtattgattatgctggcaattgttgtacagcaaaaaaaccccggcgcagacaccggggcgaagaagcgttatgaattataataaatggctggtcattttgtaggctgaggcttgaatatggaaagtcaaaacggagagcaccgtgacggcgattatggatctgatattgttccattgtctgcctccgagttctttaaagcagcttttgagcttgtccgtctgctcttcgacgagctcctgcaggctcgtttccttcatcggcgggtttgccttatgatgaagataatcaatcacttgggcgcagctttcatagtagctgatcgggctgatgacgtcgtctgatctgtctgtgatcgtgttaaaagcgatttttaatatgccgcgtatatgttcgaagtcataaattgattttaaatcacgtacaatgagaaggatgacagcttgttcaattgtatattttttgccgagtaaggggtggccgattaaatctttaatatcgcgcttcacccagttttggacggcggttgattttaaagacgtcagctcgcacagatttcccagctcgacaatctcgttagttgaaagcccgtattcctttttctctttttttcgttcgaatctcgtcagaaattcagggatatgcagacggctttccgcttcatccaaggtcatatccgctgattgcaataagatttggagaggggttgcgtctccttggccttttagcgcgtaaagaagccggaccatatcagttcgggtcagtttaaacgtgttcatggttcacctctgattgattacgtgttactttctaatatcaatgggaattacattaacatcatacgtcgaaattgttgcattttcaaacagatcatttataatttaagtaaataagttcttttgatcttaaaaaagacggaggtaattatggcgaaaagaatatttctgtttattttaacgaaccttttggtcattacgacaatcggaattgtgcttacgattattacaagcgttaccggtgtcggctcgtatatacaaaatggccgcattgatctgatggcattgctcgtgttcagtcttgtcgtcggttttgtcggttcttttatttctctcggaatgtccagatggatggccaaaacgatgatgggcgtccgggtgttaaatccgaagaaacagtcgctcagctatgaagaacagcaattggttgaccgtgtgcacagattgtcccgtgccgcagggatgacgaaaatgcctgaagtcggcatttatcattccccggaggtcaatgcttttgcgaccggaccttctaagcgccgttcgcttgtcgcggtttcttcaggtttattgcagcagatggatgatgctgcggtggaaggggtccttgcccatgaagtcgcacacatcacaaacggtgatatggtcacgatgacgctgctgcagggaatcgtcaatacgttcgtcgtattcctttcccgaatcgcggcatgggttgcaagccgctttgtcaaagaagacctcgcgccggtcgttcattttatcgcgatgatcgtgtttcagattatcttttccattctcggcagtcttgtcgtcttcgcctactcgcgtcacagagagtttcacgctgaccgcggcggtgcagaccttgccggcaaggataaaatgattcacgccctgcgtacgctgaagtcttatacaggacatgtgaatgaagaggaccagacggcggtgcagacgttaaaaattaacggtaaaaagcattcgtcactgttctccacacaccctgatctcgatgagcgcatccgcaggctggaagcaaaataatcaacaaaacctctgacaatcgtttcagaggttttttgtttaaagatcggcaaattacataaggtaatgaaaaatctttctaaaaagccctttaaaaatactcccaatatcattagaataattacgtactacatttgagaggcagaaggaactatcttatgaaattaacactgaagaaattcatacagatcttgtcgcctgcacagctgattgcattatattattttcttgctgtgacggtggcatttattttgctaagtctgccggccgcccacaaacaaggggccagctggtcgtttatagacgcgctgtttacggctgtcagctcagtcagtgtcaccggtttaacggtcgtcaacacggctgatacattcagcacggccgggattgtcattttggctttcgtgcttcaattcggcggaatcggcatcatgacgctcggaacattcgtctggctcattatgggcaaacggatcggtctgcgggaacggaagctcatcatggtggatcagaatcaatcgcagttttccggtatcgtcaacctgatgaagcaagtgctgtttttgattttattaatcgagtttttaggcggcatcatcttaggaacatattttttaacgtattatgattcgtttgaacaggcgtacttgcacggattctttgcgagcgtcagcgccacgacaaacggcggttttgatattacgggaaattcactcgtcccgttcagacatgactatttcgtgcagtttattacgatgctcctgattattttcggtgcgatcggttttccggtgctcgtagaagtaaaggactttttgttttcaaaacagcgcagatactcattcacgctgtttacgaaaattacgaccgttacgttcggaatgctcgttttgttcggagccgtgggcatttacgcgcttgaagcaagccatgtcatgaaggggaaaagctggcatgatgttttatttttatgtctctttcaatcaaccgctacgcgaagcggcgggcttgcgacaattgatatcagccagctgtcggcgccgacattatttttcatctgcgccctcatgttcatcggcgcatcaccgagctcggtcggcggcggaatccgtacgacgacgtttgcgcttaaccttcttgcactgtttcattttgcccggggaaataaagcggtcaaggtctttaaacgcgagcttcaccaggctgatgtcatgaagtcgctggtcgttacgatgatggcgattctgctcgtgttcggatcgacgctgattctggccgtgaccgagaaaaatcagacgctcctcggactgctttttgaagtgtgttccgcattcggaacgaccggcctgtcgcttgggattactccgcatttaagcgacatcggaaaatgcgtcatcatgattgtcatgtttatcggccggatcggcattttgaccttcctttatctgatcggccgaaaagaaatcgaagcaaattatcactatccgaaggaaagaatgattatcggctgacaccgcttttcagaaagcggtgttttttattgccgtaaaatggatgagtggaaacagtttctttggagaatctacttgtaaagaggtgacgtcattgtttaccgtattttggaagtcggtagttatgatagcggtcggtacctttttattgcggattgccggacggaaatcaatcagccagctgtcggtgacccagacagtcatcatgatttcgatcggctcgattattattcagccgtttattgaacataatttatgggaaactattttcgcggcggcgatttttattgcggtattaatcctgatggaatatttagaaatcaaatcaagcttttttgagtttttattttcaggaaaaccgtcgccgttgtcagaaacggaaaaatcatcccggaaaacttaaaaaaaatgcgttttaccgaagctcagctgtcaatgaggatcaggcaggaaggcctcggagacattcaagattttaaatatgtgctgcttgagccgaacggacagatcggctatgagctcattgatgaggccaaaaacgtgacagtgcgcgacttgaaaaaaatgcttgatgaattcaaaacagatttgctgacagaaggaggaaatcaaatgaaacgcaaagcagcaaagaatgaagctttgaccaacaacaacacaccgactgagagcatggacaaagatgcatacaaaacacaatatgacggtgatcccggactgagaggcgcaaaccgcaaatcaaaacacggcaaacaaggaggcgagtaacatgacgaaaaaaaaccgccacagcaaagacatgcaaaaccataaaaagccgatggaccctaaattgcttgaagaagagtttgcaagcgagctcggtgattataacgccggaaaatggattgaaacgcttgaacagacgaagccaaagaaaaaagaagacggcaaacaataaaaaatacctcttaggcgataacgcttaagaggtattttgcattatttcgaataagcaccgtttcttgttcctttcaccgcttcaagccagccggtgatccgcagctcaataaacggctgtgcggccgttttcaccgcattgctggagagaatggacgtaagagcggccgttaacattaagagcatgactaaattctgataatcagacaagtgatcttcaagcccgatctgccgcagcgtttttataatgaatccatgcagcagatacacgtaaaatgttctcgtgccccatttcgtaaagaaataacgcttttgcggaacgagcgccaaaaagctgaaagtggcggcaaaggccaaaacataccagccgatgcgcgacagaccgctcaacagcgacactgtgccgaatgtagaataaggctccgatccgaacagccacgagtaatcaaaatcaatacaccagcataagaggaaaacaatccccagtacgcccgcggcaatctgcctgcctcttttagcccgaagcaaatcaaagtgccgtttctttaaataaaacccgacgagaaacatcggaagaaaaacaaacgtccgtgaaagactcagcgtgctgctgataaaatcaagatacccgatcatgacggcaagcccgcagctcgccccaagcgcccacattttcggcagcttcgtaaaggggtaaagcagcagattccaaaagaataagctgactaaaaaccagagagaccactgcggatcaatcggattgacgcttgccatgctttcatcctgaatcaaatagtaaaaaactgagtaaatgccctgaaaaatcaagtacggaataatcagcttcacagccagcttcttcacataacctttccgcttaaagttttttgcgaaatagccggaaaccaggataaaggccggcatatgaaaagtataaatgaatttgtagagatggagcataaactcatttccgttaataaatgaccggaggatatggccgaacaccaccagaaaaatcaagataaacttggcgttgtcaaagtaactgtctcgcgattttgtcatagcatcaccttctcttcaaaaatcatccactgcatgattatttcctgttggtgttcattttaaaataaaaaacaaaaaattgaaggaggacaaaagggattgttaggatgatgtaatggggaggtaaggatcgtagaaaaagactttaacttgtcacatcattgaaattttctgaaatgtatagggcgaatgaaggaagatgaggtattttgtagaaatattgaaggataggtttttgaagaaggagtgtactgaatggctgaaactctggatttgcaaacaaacgagtcgctgaaagagcagctgaagcggatgaaagaggaaaatgaccgcctgaagagtgatttgaaccggtatcacgtgattatgaataacacgcttgatgccatttttatatgccgtaaggaaatgaaaatcgtccaggcgaacgaggctgcggcccggatgatgcagattgaggcagagagcctcattaaccgctccgtcctggattttttatattccgtgcctcaggaagaactgaataaggccgtgaaaaagtttttaaaaaaaggccatctgtggaaagaggtgccgattaagcttgacagcggcgcgacgaaatacattgaattcctcgccagagacggaattgggaaggattatttttttgtggtgatgagggatatctcctctaaaaaaatattagagcgcgaattctccatgaacgagcagctgtttaaagatttgtttgacagggctgtcgacggcatcgtgctgtttgataaggacggcgggtttattgatgcgaacctctctttttgcaaaagttttgagatcggccagaatgaattgtcccatctgtcgctccgccattttaccgacggagaaaacaaaaagcatctgaaagaaatctgggaaaccctccgcagaaaaggaaacgccaaaggagaactgcccgtcaagcttcggtcgggcgaagagaagctgtttgaatttacgattacgtccaacttaatcagcgggttctacatgtccattatgagggacataacagagaaacggttgatggaattgaaacttttcaaaagcgaagagcgattccgcgaaatttttgaaaacgccatggacgcgattgtcatttggtctgatgacggaaagattgccaaagcaaacgaatcggcgtgccgcattttcgaactgccgatggataagctggtggagacgaatttatgtacgtttatcgttgatccgcagaaaaaatataagcagattaagaaaaaatatgaaaaatacggggaaatccgtgaagaaatgctgtttcagatggcaaacggccaatttaaagagctggaattcacatcaaaacgaaccatacttgaaggtcagcatttaaccattttaagaaatgtcagcgatcgtaagcggatggaaaaagaattgcgggaaagcgagctgaaattcagaaaagtattcaacggctcaatggacggcaaggtcttatttgacaaccaattccgcattattgacgcgaatcctctcgcaagccgtatactcggtatgccggatgaggagctgagagcgtacaccgttccggatattctttctttatttgatattgaaaacgcgggtgttcccgccagaaagattgatttagaaggaatggataatgaaatccccttcctgttaagcagcatcgacagccgcaaactggaattctccttcaaaagaaatatcattcaaaatatgaatctggccatctttaaagatgtcacagaggccaaagagcttgaagagaggctgcggaaatccgacactcttcatgttgtaggggagctggcggcgggcatcgcccacgaaatcagaaacccgatgacggcgctgaaagggttcattcagcttcttcaaggaagcattgaaggcgaatattctctgtactttaacgtcattacctcagaattaaaacgcatcgagtctatcatcactgaatttttaattttagcgaaaccccaggcgatattatatgaagaaaaagacgtgacgcagattatgaaagacacggctgatcttctgaatgcccaggccaatcttgtcaatgtgcagatccatctgaacctgaccggaaacatcccgccgatttactgtgaaccgaatcaattaaaacaggtgtttatcaatattttaaaaaacgccattgaagtcatgccgggcggcggcaatatctacgtgaccattcagtcttctgatcaagaccacattttgatttctattcaagatgaaggaacaggcatttccgaagacaaattaaaacgtctgggtgaaccattttacacgacaaaagacaggggaacgggtctcggtctcatggtcagctataaaatcatcgaagagcatcagggacgcattcatgtggaaagtgaagaagggaagggcaccgtttttcatttgacgcttccgatccggcagaataccgaagaaagaaggagcggggaatgatctgttttacaagtgtgagagcgccgtttggaaccgtcatcgtaacagaggaggagagctttattaccggcctgtttctcaccggggaagattttgaggaatggcggaaagacgcgcccggcgtaaagccgtgcgaaaccgctttgctgtcggaggcgaaacagcagctggcatcatatttttcaggagaaagaaagcaattctctctgcctctgagacaaaaaggcacaccctttcaagaaagggtatggaacgcgctgacgatgattccttacggggaatcccgaagctacggcgatatggctgaagcgatcggaaaaccgaaagcggtgcgcgccatcggacaagccaataaacgaaaccggctgccgattttgatcccttgccatcgggtaatcggcaaaaacagcgccttaacgggatacgcgggcacgaagacggatgtaaaagcggtgctgctgaacatcgaacaaatatcctataaagaaaaataaagcgtatggcacgttccgttttttcacgtccgacatatcattttattaagtgaaaaaagttggtctggtgaaaaaggaggacgaagcctgatgaaaatgagccgtccgcaaaagatagccggttatgcagagctgttttttaaaatgcatctcattacagccgtccaaaaagataaagtgattacattgtgcagacaaaaaaaccgctgacattgcctgaggcaatatcatcagcggtttttcagttcagttggcagtcagcgaataattgttcaatttcttccgtgtaagagccggtcacaattcctttctcggttataatgccggaaatcaggctgcccggtgtgatgtcaaaggccggattgaagaccggcacatcctcgggagcggttcgtatgccggagatctgtctgacttcatccggatctctttcttcaatcggaatctgatcgccgttttcaatctgcaagtcaaatgtcgaaagcggtgcggcaacaaaaaacggaatttgaaaggcgtttgccaaaatagcgaggccgtacgttccgattttgttggccgtatcaccgttttttgcaattctgtcagcgccgacaatgactgcagaaatatgtttttccttcattgtatgggcggccatgctgtccgtaatgagcgtgacatcaattccgccctgcatcagctcccacgccgtcagccgtgatccttggagaacgggtcttgtttcacatgcgtagatatgaaggccgagatctttttgtttcgctaagtaaaagggagcaagcgccgtaccgtatcggcttgtggcaatcgagcccgcattgcagatggtcatgatctggtcgccttttttaaaaaggtgcagcgcattttggccgatcattcggcatgtttcttcatcctcaatctgaatttgaatggcttcatgaacgagcgttgtcttcgcttcattgattgagatcgcatccctgatggaatccgtcagtctgtcaagcgcccacgcgaggttgacggcagtgggcctcgaactgtttaaatacgctttgacatccgcgaactgacgtcggaaatctgaaaggtcgcgggcttcaaacgacttggcggagagcgcgagtccgaacgccgcggttataccgatggccggggcgccccttactttcagcgtgacaatcgcgtcgaatacatcttcctttgtttcaagttccgcatattcagtgacgtcgggaagcttttgctgatttaaaatgcggatgtaggtttctttccattctacagaacgggggatggcaaattcattggtcatgctgcatcattcctttacacggagcttaaattggtccagaacctcggtgatatgcttcagttcttttctgttttcgatataataggcgccgatgtcaagcgccagcttcttccgttcgattcgtttgtcaaacggagtgatttcatctaagtcagccacatgggcgagtccgatcgtgcgccggatcagttcgcatcccgcaaaaccgaccgcttcctcaaacgcgtttttcagtgtgtcttccagcaggtgtctgcgggaaggcaagcagtctttctcccatgcttcactgaatgttttcacaaatgtatcccatacggcggcagtatgatcatataacggctgtctgtcgtcaccgtcgcggctgagggcgtttaacagcagattggcgataaattggccgatgtcaaacccgatcggtccgaagaaagcaaactcgggatcaatcacctttgtttcatgttcatcggcaaagatgcttcccgtgtgcagatcgccgtgaaccaatgtttccgcggaattcagaaagatggctttcaattcgtcagcgccttctttcagccgggaattgttccaaactttttctgcgtatgggcgcagctcctcttcaaaatcgtttgtctcatggtcgagaaacggttctgtaaacacaagcctttccgtaatattgcaaagctcaggatttgtaaactgctttgcgagctgctgctttactttcgcatcaatcgcataatcggatgagtaaaaaagcgttttccctaaaaattcaccgatatgaaccgataagttcggataatgctgcccttccagcagcccttttcttgaaatccgcaaatgcgagaggtcttccattaccgtgacggccatttcagtatcggaatagtaaacggccggaacgaggtgcggcacgtgttcgccctggcggatgagagcgctgctttcgattctcgcccgatcaatggtaagcggccagctttcaccgacgactttcgcgtaagggattgcctgtttaataatcagtccttttttgttttctttatcgtaaacatgaaagacataatttaaattgccgtcgccgatttcacggcatgtcagagtgcttttgttttggaataagccgagcttgacggctaacgcggcggcggagctttctgttaattgttcataaagacttgttttagttgctgacatggatttaccctccaattatgtagtggcagtaagagatcgtgacggagaatacgcccgaaaaaaagcctccttctctgaaagagaaggaggctgaaacagtgcagtccgcctcttatctctcagataacatctgatggaattagcaccgtgccttatgagacaatcgtctcggcgcaaaatgtacgcgccccatttcacaatggaattacggtcggttgctgttggggtcaaaaggccaatccctcgcccaactctcgataagagaaaaatatattgatttgtatcacaattcggattaatcagttgatgaaaatattagcaggtaccggatattcttgtcaacatttttttgaaaattaatataaatcacgccgcaagtcttggaaaaccggaatggttccccgcacggccgcgctttctgacacatcgatttccgcccggactgcgccttccgtccggtctccttcggctaaaatccggccccacgggtcaataatcaggctgtggccggcaaattcattatcgggattggaccccgtgcagttagaggctgcgacaaaacattggttttcaattgctctggcgataagcaggcttcgccaatgatcaaggcggggcagaggccattccgcagagataaacaggacattcgcgccctgggacgtatgctttctgatccattcggggaaacggatatcatagcagatcagcccggcgcacttgacaccgtcaagctcaaaggaaccgtcgctgtttcctgctgacaagtaaaggtgttcatccatcagctgaaacagatgggctttctgataccgcttcacgatctgtccgctgttatcggcgatgtacatagtgttatagacattttcgccttctttgaccgcaaaagatccggcaacgaggtgtacgttgtatgtttttgccgtttctttaagccattgttccgaaactttgccgttttcatccgccagctggtctagccgtgtgagatcatagccggtcgtccacaactcaggaagcacgattacatcagcatggcggctttcttgctcaatcaaagattctgcttttttaaagttttctgaaggatttccgtatgaaatatcaaattgcaaacaggaaacggtccatttcattttttaacacctcaagtttctctttactttttttatttaaccatatatgatgatggactatcatttcaagacatttttagaaggtgaaaatatgaactttgaaatctcagatgtactcaaacagctgccggaacaatttttcgcatcattggtgcaaaaagtgaatcaaaagctgaaagaaggcagagacgtcatcaacttagggcagggaaaccctgatcagccgacgcctcagcatatcgttgaagaaatgaagcgcgccgtcgaaaggccggaaaatcataaatactcatcattccggggcgcttacagcttcaaaaaagcagccgctgcattttatgaaagggagtacggggtcacgcttgatccggaaacggaagtcgccgtgctgttcggaggcaaggcgggacttgttgagcttccgcaatgtcttttaaacccgggagataccattctggtgcctgatcccggatatcctgattactggtcaggcgtcgcccttgcaaaagcgagaatggaaatgatgccgctgacggaagaaagagggtttctccctgattacagcgtaattcctgaaaaggtgcggagcgaggcgaagctgctgtatctcaattatccgaataatccgaccggcgctgtggcgacagaggcgtttttcgaggagacggtcggttttgcggagcaaaacggcatttgtgtcgttcatgatttcgcgtacggagccgtcggctttgacgggcataaaccgctgagctttttgcagaccgaaggcgcaaaagagacgggaatcgaaatctataccttgtccaaaacgtataatatggcgggctggcgggtcggatttgccgtcggaaacgcttctgtcatcgaagcgatcaacctttatcaggatcatatgtttgtcagcctgtttcccgcggcgcagcaggcggcggcagccgcacttttagcggatcaggcatgcgtcgcggcgcaaaatgacagatatgaatcgagacgcaatgcatggattaaagcctgccgcgatatcggctgggatgtgacggctccggcgggctccttttttgcatggctccctgtgcctgacggttatacgtcacagtcgttttcagacctgctgctcgagaaagcggatgtcgcggtcgctgccggaaacgggttcggaaaatggggggaaggctatataagagtcggtcttctgacaagtgaagaaagacttaaagaagctgcggaaaggatcgggaaactgaatcttttcacccgaaaaagcattgacatatcagaataacaatgcgataattcaaaatactttataaaatcattattcttatcaagagcaggcagagggacgagcccgatgaagcccggcaaccgactgataaagcacggtgctaattcttgcagcaggagctgagagataagattcggacataacacgaagcctctttctgctcatacggaagaggtttttttatgttttgcgaaagaaagagaggcgttcacgcatgagcgaagtattggcaacatatcttctgacagacacaacggacagtgaaaagcgggcggaacagattgcggcggggctgacggtaggctcctggactgacctgcccctggtgaagcaggaacagctcagaaaacataaagggcgggtcgtaaaagttgaggagaaagaaggaacctcagaaaatgaaacacaatccgtcatcaccatcgcctatcccgaggcgaatttttcaagagatattccggccgtcttgacgacggtattcggaaagctgtcactggacggaaaaataaaattgactgatcttgaattttccgaagggtttaaacgctcccttcccgggccgaaattcggtatatacggcatccgcaaactgctgggcgaatttgaaagaccgcttctgatgagcatatttaaaggcgtgatcggacgggatctcgccgacattaaagaacagctcagacagcaggcgctcggcggcgtggatcttattaaagatgacgaaattttctttgaaaatgaactggctccgtttgaaacccgcattatcgaaggaaaacaagtcctgaaggaaacccgggaggaaacggggcataaaacgctgtatgccgtaaaccttacgggaaggaccgctgaattgcgggataaagcgaggcgcgcggcagaactcggggcggacgcgcttttattgaatgtgtttgcttacggtttagatgtgatgcagagccttgctgaggacagggaaatcccgcttccgatcatggcgcatccggcagtcagcggcgcgttcacatcatctcccgtttacggcttgtcgcatgcgcttttgctcggcaagctgaaccgctattgcggcgctgatttcagtttatttccgtcaccttacggatccgttgctcttccgaaggagtccgcgcttgcaatccatgatgaatgtgtaaaagacgatgtctttcatccgtcgtttgccgtcccgtcagcaggcattcaccccggtatggtgccattgttgatgcgcgatttcggcatcgatcacatcatcaatgccggtggaggcattcacggccatccgaaaggagccgagggcgggggaaaagcgttccgcgccatcattgatgcggtgcttgaagcgcagccgattgaagaaaaagccgcgtcgtgcaaagatcttcagctcgcattagacaaatggggaagggtggaagccgtatgacccgcacaccgctgattatttgtgatttcgacggaacggtcaccatgaacgacaacattgtcagcatgatgaaagaattcgcgcctcctgagtggcttgaattaaaagacggtgttctgtctaaaagcatatcaatccaagaaggagtcggccggatgttcggactgctgccgagcagcttaaaagaagaactgaccggctttatcctgaaggatgcgaaaatacgggacggctttttggattttgtctcgtttgtccggtcaaacggcctcccgttttatatcgtaagcgggggaatggacttttttgtgcatccgcttttggaagggatcgtagaaaaggagcggattttctgcaatcatgcatcctttgacaatgaatatattcatatagactggccgcatgcctgtgacggagattgcaccaatcaatgcggctgctgcaaaccgtcagtcatccgaaagctatccgatcagcagaaatttctcattatgatcggtgattcggtcacggatgttgaggctgcaaagttatccgatatgtgctttgcgagagattatctaatgactgaatgcaaagaactcggcctccggcatctgccttttcaagattttcatgaggtgaaaacaggcattgaaaacatcggggaggtgcaggcatggctgcaaaagaagaacgctggcgcgaacttgccgaggtaaagcgcgagctggctgaaagagactggttcccggcaacgagcgggaatctttccatcaaagtatccgacgcgccgctgactttcctcgttacggcgagcggaaaagacaaacgaaaagaaacagatgaagattttctcttaatcgatgggaacgggaagcccgctgagaccggccattctttaaaaccctcagcagaaacgcttctccatacttacttataccaaaagacagacgccggctgctgtctgcatgtccataccgtcaataataatgtcatctcagagctttacggggatgaaaaacaaatcacttttcaggggcaggagatgattaaggcgctcggattatgggaggaaaacgcgtccgtgaccgttccgatcattgacaatccggcgcacatcccggcattggccgaaaacttcgcgcaccatgcggccgccggctcaggcgcggtgttaatccgcaatcacggcattacggcatgggggcggaccgcatttgaagcgaaaagggtgctggaagcctatgaatttttattcagctgtcacctcaagcttctgtcacttcggccgcagctggtaaaataaaaggaggaatagaaaatggcgaccatcagaattcatgacgaaaaaaatacgctcattgaacatcaggaagaagtagcgcgcttcttagacgaacaagaggtgatctatgagcagtggaacattgaaaaacttccgtctgagctttcggaaaaatacgatctaaccgaagatgaaaaagaacggattctcgcggcgtttgacacggagattcaggaaatttcagcccggcgcggatatcagtctcaggatgtcatttctttatcagacaccacgccgaatcttgatgaattattaaaaaatttccaaagagaacatcaccacacggatgatgaagtccgctttatcgtcagcggacacggcatcttcgtcattcaaggcaaagacggcacatttttcgacgtccgtttaaatccgggagatttgatttcagttccggagaacatccgccactactttacgcttcaggaagaccgccgggtcgtcgcaatccgaatcttcgtgacgactgagggctgggtgccgatttacgaaaatgaaagtgtgcaaaactgatagacgcccgaacctctcatgcacccaccggcatgagaggttttttattgtaatataaagtcagctttggctgttttttaattcttgaatatgcagcattctgtttatatcattacccgaatgggtattattctcttattcatgctaaagattccaatatgaaatgaaaaaataagttatttagtaaaaaaatgtttacaaataaagtataatctgtaataatgctcaataacccaatcaaacttgtttcctattcttttagcggtgaggggtgaagtgaatgggcagttattctgaacaagaaaaattgcttctatctattgataaaaaaagaaaaatgatgatagatgcggctaacaggcaagggtttacaggatatgacacgatcaggcacagccaggaactggactgtctgatgaacgcgtatcagcagctggtaaaccgtgatcgtacacatcaccaaggaatacagggccttgtgaagaaaataggcttgttctcccgcggtgacgtcatgcctgcatatgaagcaaacaaatgatggatgataaaacagataacgaagactgaatgcgcttcctgatcaagcgccgcatccgaaagatgaccgcgtacagtcagcacatttttccgctggcacggctcacgaagcgcctcgtactatctgccggctatgatgccgttcctctggtatatcctcttacacatactcttctttaaataaaaaacaccccgatcagggtgtttttttcatcgagaagcggcagggagggtaatggtgacctctgtgcccttatcgacttcgctttgaatgtcaatcgaaccgccgtacatcagcatgattcgtttacatacgacaaggccgaggccggtgcctttttcctttgacgttacaaacggaagaaaaatgtgctcaagcatatcttcagaaatgcccattccgttgtcggccaccttaatgactgctttatgatcgcgggcttctaaatagatggacagccggccgccttcctgcatggattccagcgcgtttttcgcgacatttaaaatcacctgtttaatatggtctttcgtgcagttgaccttgagcggccgattgacgagaacctccacattcacttccacattgtatagattcccttcagaataaataatcggcataatctcatcaagaatatcctgcagcgagttcacttccaaccgttcagcagtgggttttccaagcactaaaaactcactgacaatctgattgatccgtttaatctcctgctcaataattgagaaatacagctgatcttcctccgatttgtattttttctgcaaaagctgaatgaagccgctgatccctgtaagcgggttgcggatttcatgggcggtgctggcggcaagcgttccgatcagctccaatttctgcgcttcattttgagcgcgctccagctgggtcttgcgcttaagcaaataatattgaacgaggatgaacagaatattcagcagcacggcaatactggacatcggcagcagcacgcttttggtcagctcattcagctcaaccggtttcggataaacattgatattccaattaatatcatccagatagccgctgaccggtttcacaccttctgattgatcagcccgtccgctggcaaatatcactttattctgattggttgccttgacataaacgtcagggctcagcatattgatcatatttctcaaataatcgacttgtatggcggctactaaataatccgtgacttcccgttctgcgtctaacaccggcacgcagatcgtgaagatgcgctggcctgtaattctgctggagtagtcatttgtgatgaccgtttttttcgtctttttcgccttcgtaaaatacggtctgtcggccaaattcacctttgatttcagatcagtcgtgcttgcgatgacatcacctttggaattcagcatatacagtccgctgaatctgggttcatcctcaaaagcctgatcgagaatgtcaatgatcttttcttcattgacaggcttatcgacagcgatcgcaagtgttgtcatccgggcttttgtttcaccgattaaataattgagcttattgcggtgaaggttgagcatcatactggcttcctgtatgtgtttatcggctattttctgcttttctttttcataaatgaaaaagctgataataagtgccgggatgatcaccaatatgagataaagcttgatctttccccgggcacctttaaatgtattcactctgcatcgctccaacattacacttgaatagaggtattatatcatttttatacttctttaataagaaaaaataaccaaaatgatagaaaaacaaattattttattaaggtctgacaaaaagaagagaaattttggaaacatttttgttgacatttttcattttgtttattaatgtttctctgtaacggtttcttttgtaaaaggatgattgaatgtatgacggataaaacagaaaactcattgaaattatttattgtactgtcacgtgcgtaccgatctattaacgaccatatgaataaacatattcataagcacggcctgaacccgacggaatttgcggtgcttgagctgctgtaccacaaaggcaaccagccgcttcagcagatcggcgacaaaattttattagcgagcggaagtattacatacgttgttgacaaattagagaaaaaagaacttctcatcagaaaagcctcgccgactgacagaagagtgactttcgcacagatttccgaaaagggaatccgtcttttggacgatattttccctgatcatgctgacgaaattaaagaaatgatcagtgtgttgagtgatgaagagatagaaatgtgtacggaaatgctgaagagagtggggttaaacgctaaacattttcatcagaaataaaaaaggaagccatttgaaaggcttccttttttatattactgattttggtcagtcgcggcgtttctaggctgtatcaatacctcgacgcgcctgtttttgctgcgcccttcggcggttttgttcgacacggccggtttatactctccgaaacctttggcgctgaatacttttgcgtcaagtttcgggttttccgtgagaatagccatgaagttgacggcccgcatgacgcttaaatgccagttagattgatattgtgagtttttaatcggtacattgtccgtatgtccgctgataataatgttccttggcggattcagcacaaggagattcgagatttccttggcaagcggaatatcttcctgacggatatccgcccgtccggaatcaaaaaagatactgtctttaatggtaattaagagtccttctttagtcagctttgtttccagctgagtttcaagctttttattttttataaattgattgacttgcttttgcacgccttcaagttcttcgcggtcggctgcttctctttctttctttttctgttctttatctttttccttgtctttttttaactgatcaacgccgtctttttcgttttcaggaggggtgacgcttgaatattcaagaacacccgtgcctccggtaaacacggcgttaaatgatttagacagcatttggaatttcgccgcatcgaccgagctcatggcgaacaatacaatgaacagagccaaaagaagggtgagcaaatccgcgtacgggatcagccaagactcatccacatgctcgtcatcatgcttcttcttcttttttctcgccattgtttgcctctccttcttgttcagcgacttttgcgcgttcattcgcaggaagatacatgagaagtttttgttcgatcactttcggggcctgtccttcaagcactgacagaacgccttcgatcatgatttcacgcagtttgacttcctgctttgatttgcgtttcagtttgttggcgaagggatgccatagtacatatcctgtgaaaatcccgagaagggtggcgacaaacgccgcactgatggcatgtccgagcgcctcggtattgttcatgttggaaagagccgcgataaggccgatgaccgcacccaaaacgccgagtgtcggcgcatatgtgccggcttgtgtaaagatggctgcgccggcctggtgtctgtcttccatcgcttcaacttcctcagtcataatatctctgataaattctgcgctttgtccgtcaaccgccatactcaggccgtttttcaaaaatgcgtcatccacgtcttcaatgcttgcttccaatgcgagcagaccttcacgtctggcgatttgcgcccattgagagaacataggaattaattgcgcaattgtcagctgtttgttttctttaaacagcactttaaaaagggcaggcacttttttgatttcttttccggggaatgcgatgatcaccgcagaaatcgtaccgaacaaaataatcagaatagctgccgggttagcgagtgcgcttaagctgacccctttcagcaccatgcccacgcttaaagcaatcaaggcgaggatgataccgataatcgatgttttatccatagttttcaccaaatcctttatactagctttctatggttaatatcggtggcagtgcatggaactttagggtgattgagaaattgttcccgaattcttcacagtttctccctttcggcatggagaaagaaacaaaaaagcggctccccgcgaggagggaaccgcttttttcttattgtgcccggactttgatgccgtcctcttccattacgacatggaaggcttttatttcgttgtcatccaataagagatctgtcatttcgtcctcgatcaattcttggatggttcttctgagcgggcgtgctccgaaagctgggtggtagccgatttcagcgattttttctttcgcttcgtccgttacgctcaggctgatgccgcgctcttttaatgtgtcttcaagctctgtgagaagcaggctgacgattttcacgagatgttcttttttcagggattggaattcaatgatgctgtcaaaccggtttaaaaactccggtttgaagaacgcgctcagtgaatcaatcagcgtttgttcctccaggacgctctcttcagattggaatccgactttcacctgtttttcgccggttccagcgttgcttgtcataatcaaaacggtatctttgaagctgaccgttctgccctggctgtctgtcagacggccgtcctccataatctgcagaaacatatgctggacatcagggtgggctttttcaatctcatcgagcagcacgatgctgtacggattgcggcgcactttttccgttaattgaccggcttcatcgtgtccgacatatcccggcggtgaaccgatgatttttgatacggcgtgtttttccatgtattcactcatatcgagacggataatggaatcttttgtaccgaacagttcatctgcgagtgtctttgataactcggtttttccgactccggtcggtccgacaaagaggaaggagccgacaggtctgtttttggattttaagccggcgcggcttcgtctgaccgctttcgccacttttttcacggctttttcctgaccgatgacgcgctgatgaagatgctcttcaagttccttcattttgacttgttcatcagcctggagttttccgaccggaatgcctgttttctgttcaatgatggcttgaatatgctccgccccgatttcaggtgaagaggccggtgtttcatgcgccagctgcttttccaacgccgcttcttcatcacgcagtttcgcggcaagctcataattttcttcatgaagcgcttttgttttctccgcgtcaattgctttgagtctctcagccgcatcttcttcatttacggtatcaagctccaggttcgccttagagccggcttcatctaataagtcgatcgctttatccggcaggtggcggtcctgaatgtaacgggatgaaagcgtaacacaggcgtttatcgcttcattgctgaatgtgacgccgtggtatttctcgtatttatctttaatgccttccagaatgctgatggcttgttctattgtaggctcgtgaaccatgacaggctggaagcgtctttcaagcgccgcatctttttcaatctggcggtactctttcagcgttgtcgccccgatgacctgcagctcgcctctggcaagcgccggtttcaggatgttcccggcatccattgatccctcggcagagccggcgcctacaagaaggtgaatctcgtcaatgaacaagatgacgtttttccgttcttttaattcgttcattaattgtttcattctttcttcaaactggcctctgatccctgtattggcgacgagagaagcgacgtcaagcaggtaaagctctttgtttttcaatttgttcggcacatcgccttcagcgattttaagcgcgaggccttctgcaatagccgttttaccgacgcccggctcaccgatcagcaccggattgtttttattccggcggttcaaaatttcaattacgcgcgccacttcatgatcgcggccgatcacagggtcaatcagacctgcttttgcgccgtttgtgacgttttgagcgagctcgtcgagcaggcctttttcagagccggcctgctgtttattttgattgggagcgaaaccttgctcaaacgggaatccgaatgattgtggccccatgctcatagacggttttcgggttaattctgtataacatgtttcacataaaacgaattgtttttgaatggaattgacttgcatgttcaggcgaatcgtcgcctcgtttttctgacaatgttgacaacgcatttgccaaaacctcctcgaaaaatgtttgatcatctttgaccaaacggattagaaaataaggtcttaactttgaccttctttgattaatagtatactctgaccttctttgactttcaagtgttttgtttcaaaccctgaaaaataaatgtttacagcatgataagtgatatttgtgaggtttgattatttttgaccaatatagtcagaaaggaaatgaaatgttttgacctttcttgatgaagagtatacgccggccctttttttctttcaatatttttgcttagaggagagaggtgaatctgttttctccggggaaggacgatttgttcgtcttttcgggcgacttgtctcataagcatatataaaggcctggacaaatctgcgcttagccggagggtgaaatgggacaaacaaaaggttctgcaagtcagcttgcatttgtatacgtaggcacggttgtaggagccggttttgccacgggacgggaaatcgttgagttttttctgaagtttggctggatcggtctgttcggtatcgtggtaagcggtctgatgtttacatatttaggcgccaaaatcatgatcatttccaaacggattcatgcagcatcttatcaggaattgaacacatatttattcggccagtccatcggccgcgccgtgaacatgtttatgatgtttatattgctgggagtgacctctgtcatgctgtccggagcgggagcgctgtttcatgaacagcttggctggtccgcacaagcggggatccttctgacgatcgtactgagctttgccgtcatgacaagcggcgttaaaggtgtgttcggcgtcaatatattggttgtgccgcttttaatttccttctcttttatcgtgacagcagattcatttgtatttacaagcacgagaaacgcggacgaatgggtatggcctgacaagtggaattggcttttgtccgccgtctcttacggcgcgttaaatttatcgctcgcccaagccgtgcttgtgccgcttgcgaatgaaatgtcttcagagaaggtgatcagaaggggggcttattttggcggcgttctgttgacactggtgcttgccgcgagctttttatcattatcggtgctgccggatgtgctggagtttgacattccgatggctcaagtcgtctattcgtattcgcgttcgcttcatatcatttatttgtttattattttcggagaagtgtttacgtcggtcatcggtaatttatacggattggaaaaacaattaaacagttttcttcatataaaaagtacatatatttacggcggcattttggcgtttgctttcattatcagccaaatcggctacggacagctgatttccaccgtttatccggtgtttgggtatgtgagcctcgctttcatcggcgcattgatttgcaaaaaaatcccgaaagaaaaataaggatataaggaaaatgtctgtattttttgggaattccccttcttttttcctgacatttctgtataatgaattgggaaatgatggggaggagtaagagatgaaagctcgacgtgtattattgggatttatttttatttgtatcggcattgcgttttttttacagagggcgggagttattcatatatccgcaggttcggcgtggccgtttcttttcattataatgtccgcagggtttcacgccggatttatttttgcgaaaaaaacgcctgaccaggcgggactgctcgttccgggcggtatgttttttgtgctgggctgcctgttttgttttgaaacggcaacgggatggacgtattcaggcgtgacgtggcctgtttatatatgggcgcctgctctcggtctgtttgagctgtggtatttcggcgggaggaagttaggtgtattgattcctgctttcatcctgacagccgtgggagcactatgctttgccggtatgctgatgacggggctgtggccgtttttgatcatcgcagccgcgcttttgtttcacgccgctgcctttatgcagccgaaaaaaagatcgggccttcttattccgggcggcattttgcttgtgacgggttgcttgttatggtttgaaacgctgacggattggacttacgcaaatgtgacatcgcctgtctacctctttgccgttgcgttcggtctgtttgaagcctggctgttcggcagaaagcagagagggcttttgactgctgcggcggttctgtgcgccgcgggcattttcggcatattcaccaatgcaaatgaagtcatcagcgaacgcggctggcccgctctcattcttttgctgggcgccgcttttcacattccgattttcggcccgaaacctgtcaaaaacgcgggacttctcgtaccgggcggcatcttattgattacggggatcttgtttgtctttgaaacggcaaccaattggtcctactccggtgtgacatggcctgtttacctgcttgcaacggcattcggtttatttgagctgtggctgttcggcgggaaacagaaggcgctgctcatcccggttgcggtgctgaccttgacagcactttgctttatgatgacgaatcagccgatcattccggtttctgttttctggcctgctttatttgttctgatcgggattgcgctgatggtatttccggggaaaaaacgcggggcttaaacccgattttgcagcctgacacagggttcaggctgtttttttattgtcacgggaaacaacattatggtatgatagcaaaagtgaaaaaagaagaaaatccgtattgatgcgggagaggttctagctacaccctctataaaaaactaaggacgagctgtatccttggatacggtttttttatgttttttagggcgccttctccgaaaaaggcgctttttttatggaatgatagataagggagagaaagacatgatgaaaaaagaaaaagcagttgtggtgttcagcggaggccaagacagcacgacttgtttattatgggctttgcaaaactttgaagaagtggaaaccgttacattccattataatcagcgtcaccaagaagaaatcgatgtggcaaaatcgattgccgaaaagctcggtgtcaaaaatcacttgcttgatatgtctcttttaaatcagcttgcgccgaatgcgctgacaagagatgatatcgaaattgaagcgaaggacggggaactgccgacaaccttcgtgccgggacgcaaccttgtatttttatcctttgcatcgattcttgcatatcaaatcggcgcgcgccacattatcaccggtgtttgcgagactgatttcagcggctacccggactgccgtgacgagtttgtcaaatcctgcaatgtcaccgtcaacttggcgatggaaaagccgttcgtcattcatacgccgcttatgtggctgaacaaagcggaaacgtggaaacttgcggatgagctcggcgcgcttgattttgtaaagaataacacactgacttgctataacggcatcattgcggacggatgcggcgaatgcccggcatgcctgctccgcaataaaggatatgatgaatatatgaaaatgaaaggagagcggaactaattgctttctcaaatatacccgcaggttcagcatccttattcgtttgagttgaataaggacatgcacatctcagccgcgcactttattccccgcgaaagcgccggagcgtgcagcagagtccacgggcacacgtatacagtaaatattacagttgcgggggatgaactggacgattcaggctttctcgtgaatttcagcgtgctgaagaaattggtgcacggcgcttatgaccatacattgctgaatgaccatgacgaattttctgaagatgacagatattcactgccgacgaccgaggtcgtggccaaaacgatttacgataaggtgcagtcctacctcgaaacactggagaatcagccggtctgcgtgcagatttttgtcagggaaaccccgacaagctattgcgtataccgcccgaaaaaaggtgataggaatggctaaaggaattccggtattagaaattttcggaccgacgatacaaggggagggcatggttatcggccagaaaaccatgttcgtccgcacggcgggctgcgactactcctgcagctggtgcgactccgcttttacatgggacggctctgccaaaaaagatatccgctggatgacggcggaagacatttaccgcgagctgagagaaatcggcggagacgccttttcccatgtcaccatctcaggaggaaacccggcgctgttaaagcagcttgacgcgctgattctgctgctgaaagagaacggggtgcgcgccgctttagaaacgcagggaacggtctatcaggattggttcacaatgattaacgacctgacgatttcaccgaagccgccaagttcggggatgacaaccgattttgcaaagctcgatcacattgtgtcttcgcttgatgcggcagaaaggcttaacgcggtcagcttaaaggtcgtcatttttaatgatgaagatctgcaattcgcgaaaaccgtgcacaagcggtatccgaatatcccgttttatcttcaggtcggaaacgataacgtccatacgacggacgaccgggcattgatcgcacatctgctcggaaaatacgaaacactcgttgataaggtttcagccgattcggatctgaatctcgtcagagtcctgcctcagctgcatacattgctttggggcaataaacggggagtttaatagaaagggagatttatatgacaagaaaagaatcagaattagaaggagttacgctcctggggaatcaagggacaaactatttatttgaatatgcgccggaggttttggaatcatttccgaataaacacgtgaaccgtgattatttcgttaaattcaactgcccggaatttacgtcgctttgccccaaaacgggacagccggattttgcaaccatctacatcagctatattccggacgaaaaaatggtggaaagcaaatcgctgaagctgtatcttttcagcttccgtaaccacggagatttccacgaggactgcatgaacatcatcatgaatgatttgatcgaattaatggacccccgctacatcgaagtatggggcaaattcacgcctagaggcggaatctcgattgacccgtatacaaactacggcagaccgggaacaaaatatgaaaaaatggccgaacatcggatgatgaatcatgatatgtacccggagacgattgataatcggtaattattccgttgtgtgatacggagtgtgacccgcactaagctcaataaaagtgtgacctgaggtgcaacctgaactgtgacttttatgcagtggaaaattgatagtacagaagcagattaaggcgtacaatttgtacgtcttttcttttttatccgaaagaaaaaatgcctatctagagatcataggcattaaatattattattaatatcttcatttattttttggctaagtttctgaaccttctctttaacatttgaaacagctcttttttgaatttcatcaaagttttcctgaatatagtccgtgacacttcttattagaacttcactttcaaaattgaatatctcatttatttctgactgttcttcatctgttaggtgagggtattgaagttgtttagcatttacttcagcagctacatcaatcctcactttagttgttctggttgtacaatttcatattcaccttctgcatactcttgctccgcataatggcttccccattgacagagctcctgcaagataggtttaagagattctccaagttcagtggatgaatattcaaccttcggcggtacttgattatacatctttctgctcacaagtccactggcttcaagctctctaagtgtttgaatcagcattttctgagttatatttgggatcatgcgctttaattcactcgttctctttggtccattcattaaaaagtataatacaaggcctttccattttccgccaatcacttcctttgtcacttcaaacccacagctaaattttttcatgtctaaagctctccattccgcatttattactttttagttactatatcacaaaaaagtgggtacttccgataatgtgcttactgaaggatactatatcttgtaagttgttcttcaagtacttaaaggtactagacataaaataaaatcaattctaaaggagtgttaagtatgggtaaatttgaaggtaaaatagcgcttgtaacgggtggaacaagtgggattggtcttgctgcagcacaaaaatttgtaaacgaaggtgcatatgtttatatcacgggacgcagacaaaacgaacttgataaagctgttaaccaaattggcaagaacgtaaccggtgttcaaggtgatatttctaagctagaagacttagacaaactatatgacatgataaagcaggaaaaaggtaagttggacattctttttgctaatgcaggcaccggcaacttccttccattaggtgaaattactgaagagcaggttgatagaacgttcgacattaacgttaaaggaaccatctttactgttcaaaaagcgttatcactattcccggacaaagtaggttctattattgtaacgggctctactgctggatcaattggcaacccagcgtttagtgtatatggagcatctaaagcagcgttaagagcactggttcgcaactggattcttgacctgaaaggtactgaaatccgtgtaaatgtggtgagtccaggagctattcttacacctgcatacgatgagctttttggtgatgcacttgaaggagcaatggaaaatgccagaaatactgttccagctggaaaagttgggacacctgaagaggtagcaaacgctgtatctttccttgcttcagacgaaagcagttacttgacgggtgttgaattgttcgtagatggcgggctagcacaggtataatttcactgcgcagagattacaaatagtccccttggtaaggtgtgaaattggtgtgacttcatgattaatgctagagcaagtacttatgggacaagactttgacctgccttttcttccacgaggactgcatgaacatcatcatgaatgatttgatcgaattaatggacccccgctacattgaagtatggggcaaattcacgcctagaggcggaatctccattgacccgtatacaaactacggcagaccgggaacaaaatatgaaaaaatggccgagtaccgcatgatgaatcatgatttgtatccggagacgattgataatcgttaatcactataaaagcgtgcctattatgactttttatgcaaataaattgctattgcagaggtaatgtaagacgtacaaatgtgtacgtctttttcttttaagcacaaaaacaatttattaacgaaagtattttggcagaaaggctaacaaaatcaaaggaaaatatgttgtagattgctttctttttttgtggggcatccatatccaatcacgttatcttgcacttgaacattttttatagactggtaccgcgacaaattatttctcttctacataccaataaagtagacattaaaaagtgaaagagagggcgaaaatgtgtgaaaattcttttcctcgagagtcatcccatgtggctctatggtttaccaaatgggtttagggaagcaggacataccgtaatgatttccggtcctgtaagtcgggaaaatatcactgaaatgatagacgaatttaaaccagatctaatagtatctatgggatggacaccagagcattcaagggaaaagcaggcctggattcgcaacgctactaaaaaggtgaatatccctctcgtttattgggcaactgaagacccgctgcacactcaaaactttactatcccgttaattaaaaaggtgaaaccagattttgttttcacggttacgccttctctgtgtaaaacttatgaaagcatggggattaaagcagctcacttagactttgcatttcacgaaagtatacatcaccaaattaaaccattagcaaaatacagttgtgatatagcagtggtggctaatgcttaccctaattttcttgaagaacatccggaagtgttccgttcgtcctctttaaaaacgcttattcgtcctcttatacggaagggtattcgcattgatttttgggggagaaactgggaaaaaatgagtaaatatataggaagagaaattccccgcaattggatccatggataccttgattatactgaagcatataaagtctacagttcagcaaaagtcgttatcggtttgcaaaactgtgaaagccaacttacgcaacgcacctatgagattcttggttccgggggggttttattgacatcggatacaccagcagttcgaggtaaattcaaacctggccgcgatctcatcgtttcttcctccccaaaagaaacattggaaaaggttaaatactatttgaatcatgatagcgagagaaaaaagattcagataaacggtaaaaaggctgtaaagaatgattcctatctgcatagagccgagagaatgcttgaggtgctaaaaagcagaggaattataagaaacttaggggaaaccattcattatgtagatgttctcaaagaaaaatacgtgatccatcatgttactcccggtgaaacattatcaataattgccaggaagtataatatttccctgcagcaactcatggagcttaatcatttcaaatcagatcaaatatatgctggacaaatcattaagattagagagaaactgtttagaaatattgataacaaatttttctaaaggagagtaatatgaatgaaggggaaaatacctaaaataagaaatcaagcgaataaagtaaaaagaacgcctcgttatatggaatttcccgtgacatacgaagtatatcatgtggaatccggcgatacattatggacgctttctaaatccttcaatatcccggtacaacaacttatgaatcttaataagctttcttcagatagaatttatcctggacaaattataaagataagagaaagataatctttgaggtttcggaaacgaatcaaattgaaatgacaatcctcatttttttatttgtggggaacttgatatttttggggatgaaggggttatgagatgtttcaaatgagctatttctattctggattaggatgggattttattcaacacgttgatcaaacgaacggagtattaaatgttgtgtctcctgattttttctatatcagaaaagatggatcattacttctccgttcagctaatcccgatgtgattaaagctcttcatagaagaaaattaaaagtagttccttttctaagcaatcattgggatcaggatttgggacgattttcattaatgaaccgagttcttttagctaaacaaatttctcatgcaatagaagaactggatttggacggagttaatatcgatatagaaaaccttacagaaaaagatcggaatttatttacagattttgttagattggtaagagaaagtattcctagacataaagaagtatcagttgcagtggcggcaaatccttttggctggacgaagggctggcacggatcatatgattacgagtatttagctaaatatgcagattaccttatgattatggcctacgatgaaagccaccttgctggacctactgcaagtgtaggatgggtggaaaagtccattcaatatgctctgacccaaaaaatctctcctaaaaaactagttttaggattgccattctatggccgctgttggatgaaaggccaatctgcctctcaagccattcccctttaccttgttgactcattagtaaaaaggcataacgggacaattatttttgacacaaagagtcaatctccaaaagctatttttactgtcaatcacgataacaaggggctgttgccttcgggaacatatacattatggtttgaaaatgaacagtcactcagagcaaaaataaaactcgctcaaaaatataatctgaaaggtcttggcagctggagtcttggacaagaggatgcgtcagtctggaatacagtgtttaaaaatatataatgatttatagttcaaagcaaaattcgaagataattgcaatgaatctctatcctgaatggatgctggtttatctaaaaaacatgatgagaattgattgaccactctcattaaaggatggggaaattcaaggcgccaaggtacgtggagaaccatgacttgttgataatcgaccatatagtttctcctcagaaatgagggggttttacataaaaaagacgagcgaatccggggggaattccactcgccgctttctaatgaaaagacgggatgctggatggcagctcgtctgtttcattataaaatagggaacgtatgtttgtaaaggcctgcgctgttttttctcattcggagcggatcaattgtaaaggaatggtcagcatgatagcatgtcctgtaaaaagaaggagtgttcgtaatggagccgttagagttaaacggtgtaagactgaaaatgtatgattgtaaagaaagtgcgggtgaaaacggccgcatgatttcatttatattgaaggtgacctctgaaacgtatcatgatattgccgtccttttgtatgaaaaaacatttgacatcaaggcgcccgagcgcgggcttgaattccgcggtaaaataaccaactactatacatccgtcactaatctttacaataaagatgagacaggtgatttttttgtagaaatgaccgagatctgaattcatttgaaaaagctgccgggcggcagcttttgtgcgggatatgtaaatggttcggattgttcggggggtttaataggagtctctgatgattttataattcttatggttgacgacagtgagggaatctaattcaaggtcacgataattatccatgatggttacatcaacgatgacggagttttcatttactttttcaacaataccggttaatccgtttttaaattcaatgacgtttccaaccttagcaattttcacgagcttcctctcctttatcataaatcctgtttgaaaatattttgcagtattttctttaagaagtaaagcgatatgggtatcagcccgctcaatcattgtcccggcgggggaaagatggtatattgtttttcgggaaaaagccgagaaaaggaggctgtgttcgttgctgcctgaggaaatttcagaatgtatcaaccaaatgcgcaccggggaaatcaaagaattcagggtgcagaaagaacattttcttgcatttcgagcagttttatcgaagcaggaagattttaagcatttccgcggtattgcacagcagggcggagatgttgtatttcagtatttagaacagccaagaagctgacggctcctcgcacttgaggagtcttttttttgttttttggtttctcatttcatcttgctgtaacagatgtaaacaaaatgtaaaatccctccgatggatacttttactgctatttggttaatgttgtgaaaatgacggctgttttcctgccaataacaaggctgttaacgaacttcttccatcataaaagctgattgggagcactggaaaatctttaaccgtgaatttgcgcacagctcttgttaaggtagtgaagtatttaaggaggaaatcgtatgacgacaaaatttgctgccttggctgtcttttttctatgttttatgcctgcatcaaaaattgaacatacagaagctctgtttacttttgcgaagaagccaaagcaagaacccagcacactggttgctgatttaaataaaaaaagctcggttccgaagctttcaaaaacggatcataagcattctatccaaccgataaagctgtcatctcaccaagagaagaaggcaaaaccggaagagacggcttatcagccgccgaaaaaaacgtattcccgcgctgacagacaacttctgtcacgtctcgttcacgcagaagcgaaaggtgaatcttataaagggaaggttgcggtagccagcgtagtgctgaaccgcactgaaaaaaacggcttcccggataccattcggggcgtgatctatcaaaggaatgcatttgaaccggtagcaaacggaagcattaatcaaaagccggataaggattccatcgccgccgcaaatgaggcgcttgaccatccgggaagagaaacgaacgcgttgtttttctacaatccgaaaacggcatctgaccactggatccgttcccgaaaaattatcgaacggatcggcagacacgtatttgcgatgtaagcatagcgggatcaaaaatatcccggctatgcttttttcaattttgagaaatcgaaaatattttcagaacttgtctcatatgatgatggaagaacgagagacaaggagagacaccatgaatcgatttgtgaaagggatcattcttttatccatcgccgcctttttcgcggaatgtctggaatttgtcgtgaatatgatactggcgcgggagcttggcgagcatgggatgggactttacatgagcattctgcccaccatttttttaattatcgtcatcgccagtctggagcttccgatctccatttcaaaattcatcgcggaatccaatcagaagctgcatgaaagcatgctccggcatgccttcagaatgaccgccgtttttaccgcgttttcaaccgcggccgcaagcatcgcgctgccgttcattcctgtattcgatacgtatcacccgtttattaaagggattgtcatcgggctgattccagtcgtcgcttttacatccatcgccagaggttattttatgggtgtgcagcaaatgggaaaaatcgcggttgcgaatgtcatgaaaaaaatcattcaagtgctttgtctgtttatcttttttcaatggtactcttttgaaattgatatggccgtgctcatttcattatttgtgctggtcgcaagcgatgtcgtggtgttcgtttacttgtatacgcagtttattttggcgaggagggcgctttccggccatcagcacattcatcttcgcgggaaagacgtgcggaaacgcctcctggccgtatcgatcccgacaacgggacttcgtatatttcatgcggtgacgaacgccattgaaccctttttagtgaaaggagcgctgctggcgtccggggcagccgggacagccgcgattgatcaatacggcatgcttgccggtgttgcgatgacaatcggttcgtttcccgcatttatcgcccattcgctgatggtcgtcatgattcccagcatttcagaagcgtatgcgctgtcccaatatgatattgtgctgaaacggctgagacaagcgatttttattacattcggctacggcattccggcagtctgggtcatgtttcagttcgcgggcccgctgacccatttgttttttcagtctccggaagcgcagtattatttgcagcttttgtggccgttttttctttttcatctgtttgtgatgccgcttcaggcctgtctgatcggtatcggccacgtgaaaacggcgttttatcataacgtatggagcagcattgtggggctttcgatgatgtatgtgctcggttctatgccggaattgcaaatgctcggcattatactcggcatgaataccggcatgattcttctgacaagtttacattacgcgacgatctgcaaagacctcggtgtctccgtgtttttgacgggcggcggaagaacagcgccccggatcgaaagctgaaaaggctgatacatttcaataaggaagggcaagctatccgaaacgcgtgaaaggaagatcatatgcataaaaaccgcctaattgtatgtgcagtccttttgatagctgccgccgtctggatgcctgaagcaaaagcctcatcagaaaaacaggcagttcccgccgtgtttctgatgaagacgattgaaggagacgagatatcgattccgaataaagggcagaaaacgattttgcatttttggacatcgtggtgtccgccgtgcaaaaaagaactgcctcagttccaaacgtattatgaacagcatcagtccgatgatgtaagccttgtaacggtaaatttgatgaatgccgagcgaaacaaaaataccgttcaaaactttgtcagtcagcaccatctcactttcccgattgttcttgacacgaaaggcgagcttatgaaggaatacgatgtcatgacgattcccacgtcatttctgctgaatgaaaaaggagaaatcgaaaaaaagatcgtcggtccgatgaccgcctcgcaattaaaagaatggtcagagaaataaaaaggtgcgggaggaattcctcccgcaccttttttgcatataatgaacagctgaagaaacactaatgataattattatcaaaaagaaattaaaacaattataattgaaatcttccgccggcatgctataataaaggaaacactgcgataacactgtgaaaatgctgcctgtcaggcggctgttttgcttttatcggggaattgaagatgatttgcgttctcaattagagaggagaattcataatgaatgaacaagtgatgacacaaacccattcacaacagcacatacaagaagagcgggcgggaaaaaagtggctccagcatgcagaactcattgcggcgctcgtatccggcgtccttattcttgcggcctggttttttaccgaaacaaaaggcctgtccgtcactttgtatatccttgccttcctgatcgggggatttgcaaaagcgaaagagggaattgaggataccattgagacgaaggcgttaaatgtggaactgctgatgatttttgcggctgtcggctccgccctgatcggttattgggctgaaggcgctgttcttatctttattttttcgttaagcggcgcgctcgaaacatatacgatgaataaaagcagccgtgatttaacatctttaatgaaactggaaccggaggaagcgacactgcttgcggacggacgggaaaagcgggtgccggctgctgaacttaagatcggtgacatgatcgtcattaagccgggcgaacgcgtagcagcagacgggatcattgagtctggcgtgacgagcctcgatgaatcggcgcttacgggtgaagcgatgccggcggaaaaaacagccggagattctgtgtttacaggaacggtaaacggaaacggctccttaacggtccgtgtgacgaaaacaaatgaacagtctttattcagaaaaatcatccggctggtggaatcagcccaaaacagcgtgtcaccggctcaggcatttattgagcggttcgaaagtgtctatgtcaaaggcgtgctgttagccgtggctttgcttttattcattcctcatttcgctttaggctggagctggagtgaaaccttttacagggcgatggtgtttatggtggtcgcctccccgtgcgcacttgtcgcttctattatgcccgctgcgctttcccttatctcaaatggggcccgcaacggattattggttaaaggaagtgtgtttttagagcagctgggaagcgtacggatgatcgcatttgacaaaaccggcacggtcacaaagggacagccggcagtcgcggcatttcaagctgcggaacatgtgagtgaagatgagatcatgcaggcggtgtatgcgatggaaaagcaatcaagccacccgcttgcaaaagcgatagctgaatttgccgaaagccggggcgccgcgcccgcaggacatctatcgattgacgagacgtccggattcggtgttcaggctgaaatagaaggcgtcaaatggatggtcggaaaagcggggtttgcaggtgaagatgcggcagatgcttttttgcaaacatcgggaaaagaattaaaggataaaggttttacactggtctttgttaaaaaagatgaccggattgcgggctgctttgccttaaaggatcaaatccgacctgaagccaaagccgtgatggctgagcttgaatcactgggcattaaaacagccatgctcaccggcgatcagtctgaaactgcggctgccattgcaaaagaggcgggcatgacgacggttgttgccgattgtctgccggaccaaaaggcaaaagaagtgaagaagctgaaagaaacgtacggcacaatcgccatggtgggggacggcattaatgacgcgcccgctctgaaaaccgctgacgtcggtattgcgatgggcggggggacggacgtggcccttgaaacggctgacttagtccttatgaaaaatgatcttcacaagcttgtgaaaatgtgcagactctcaaggaaaatgaaccggattattaagcagaatattgttttctcgctctcggtcatctgccttttgatctgcgccaactttctgcaggtgatggaactgccgtttggcgtgatcgggcatgaggggagcacgattctggtcattctgaacggactgagattattaaaataaacatgacagccgcacatcgggcggctgttttttaaatgttcgttcacagcataaacgccggaaaactgatagaatgaataaagagtcactttggtaaggaggaaaagcaaaaaatgaacagattagaacgtgtttcatcttggctgaaaaaagaagggcatgatgcggcgtttatacatacaaaggaaaacgtattttatttaactgatttttacacggatccgcatgagcggttaatgggattgttcctgtttcaggaacaggagccgtttttcgtttgtccgggaatggaagccggacaagcccgcagcgccgggtggaagcatggtattatcggctacggcgatcacgaagacccgtgggagctgatcaaagccgagctcacaaaacgaaatgtgccgcttgattccatcgcggttgaaaaggattcgatctctctttcccgctcagaacagctcaaacaagcttcagggggcgcggcatttgtttcggcagaagaaacgctcaaccaattccgtctcgtgaaagatgagaaggaaatcagcattctcagggaagcggcaaaacttgcggattacggagttcaagtcggtgtcgcggcgctcaaagagggtgtgagtgaaaccgaagtactcgcgcagattgagtttgagctgaagaaaaaaggcgtgcagggcatgtcattttcaacgatggtgctgttcggggaaaaatcaggccagccccatgggaatccgggtgcagaccggttgaaaaaaggcgatttcgttctgtttgatctgggcgttattcttgacggctactgttcagacatcacgagaacattcgcataccaatcaatcagcccgaaacaggaagagatttacgaaacggtgcttaaagctgaacaggcggcgcttcaattaagcaaacccggcgtcagaatcggcgatcttgatttaaaagcccgcggcattattgaaaaagccggatacggagactatttcccgcaccgcctcggccacggactcgggatttcggttcacgaatatccatcaatgagcagcgcgaacgacacactcctcaaagaaggcatggtgtacacgatagaaccggggatttacgtgccggatgtcggcggcgtgcgcattgaagacgatgtgttcgtcacaaaagacggcgccgaagcattaacgcagtatccgaaagaattaacgattctgaaataaaaagctttgtgataaaaaaggacggttctgaaacgcagcgtccttttttatcaccttttaaatgaaaaaatcatcaaaatgctgaaatggtttgatgtcatgcttttcattcaggggccgcatggcaaggtaactgccgccgagtatggcgagacacaaaccgattaagcaaagaatccccatcgctgttcttctcctttcaaacgaataggctgtttctgtttctagcttactgtatgaaacgcattccagatcaagggaaaaaaagaaagggggacgccatggctacgatcagagacattgccggcgctgccggggtttccgttacaacggtatcaagagtattaaacgatcatccttatgtaagtaaggacaaaagagaaagagtgaaaaaagcgatgcaatcgctcggatatacgcgcaacattcatgctgtgcatttatcaaaaggtttttccgatatgatcggcgttgtgcttccgtcggtgaatcttccgtattttgcggaccttgttgcaggtattgccgaggctgccgaagcgtcaggcgtgcatctttctttataccagacagattatcagcagcaaaaagaacgttttgccttatcacagttacaggagcgccaagtggacggcctgattatctgctccaaagcaattcctgatgaacatctgcttaccgtgaaagaaccgctcatcctctgccagtacactgatgcggcagggctttcctccatcagtaatccgcatcgggaagcatttcggcacggtctggattatctgatagaaaagggacaccggaaaatagcgatcagtctggccagaaaaaagggaaaaaacagtcaagtacgcattgccgcatacaaagaggcgctcaagaagatcgggcagccttacagggaagagctggttgtggaaaaggcgctgacgctgcttgacgggaaagccctttttcatagatggaagagctgggatgacaaaccgactgcgctgtttgcggcgaatgatcaagtatccgcaggtctttaccttgaagccaaggcaaacgggacgcgcatcccggaagagcttgcgattttgagcatcgacaatcatgatatcagcaagatgttaggtatttccacaatagatatacaaacaaaagaaatgggaaagcaggcttttcacatgcttgagaaccggatcagcggcgggcctccggcaaggaaagttcttgattaccgccttattgaacgatcaaccgtctaaaaaaagaattgacgcgctttccgttcgttttgtacgatatgaggtattgaatgacaaaggagctgaggatcatgaaggggtcctttacagttgaaaaggtattaaataacaatgtgctcatcgcaacacatgatagatacagtgaggtcgtcttaatcggaaaagggatcggctttggaaaaaaacaagcggatgtcattgaagataaagggtatgacaagatgttcatcttaaaggatgaaaaagaacaaaaacaatttaaaaagctcctcggttatgtggacgagacacttgtcgacatctccaatgacgtcatttatcatatcaagaagcggacaagccaaccgttaaatgagcatatccatattgcgctgactgaccatatcgcctttgcggtaaagcggctgcagcagggttttgacattaaaaacccgtttctcatggaaaccgaaacgctttatccggaagaattccaaattgcccgtgaagtcgtcggcatgattaatgaaaagacgggaatctgccttccggaaggagagatcggctttatcgctctgcatatccactccgccctgacgaatcggcccctttcagaggtcaatcagcattcacagctgatgtcccggctcgttcaggtgattgaggaatctttccagatgaaagtgaataaagaaagcgtccactatttgcggctgatccggcatatcagatttaccatagacaggattaatcgggaagagcagacaaaagaaccagaaaagttaatgttattattgaaaaatgaatacccgctatgctacaatactgcttggaaactgataaaaatcttgcagcaaatactgaaaaaaccagttcatgaggcggaagcggtttatctcacgcttcatttgtaccgattaaccaataaaatttcataatttcagttgaaaccttaaaaacgtgtcactgattcgatcaggcatgagtgattgagggtaaaaaacgggaagaacggtcccgttattttgcacaccctttttactcatgccttttttgttgtgtaaaagggcaaatgtaaacggttaaactgaagacttgcgccagtgaattcgttgtcatgaattttcgctgtaaggtcacactagctaacagaggaggtacatcttttatgtttaaagcattattcggcgttctccagaaaatcggccgtgctcttatgcttccggttgcgattttaccggctgcggggatcttgcttgcgttagggaatgccatgcagaacaaagatatgattcaagtcatgcacttcttaagcaatgataacgttcagcttgtggcgaatgtcatggaaagcgccggccaaatcgtatttgacaacctgccgcttctttttgcagtaggggttgcgatcggtcttgccaacggagacggtgttgccggaatcgcggctattatcggatacttggtcatgaacgtatccatgagcgccgtgcttatggcaaacggcagtattccgtctgacaaaattgaacgggcaaagttttttgcggaaaaccatccggcctatattaacatgctggggatacccactttggcgacgggcgtgttcggcggtattatcgtcggggttctggccgcgttattgtttaacaagttttataaaattgaacttccgcagtacctcggattctttgcgggtaagcggttcgtcccgattatcacatcaatttccgcattaattctcggtcttattatgttagtgatctggcctccgatccagcacggcctgaattccttctccacgggtcttgtggaagcgaatccaaccttggcggcctttattttcgggatgattgagcggtcattgattccgttcggtcttcatcacattttctactcgccgttctggtatgaatttttcagctataaagatgcggccggagacatcatccgcggagatcagcggattttcatggctcagatcaaagacggcgtacagctgacggcgggaacatttatgacggggaaatatccgtttatgatgttcggtcttccggcggcagcgcttgcaatctatcatgaagcgaagcctgaaaagaaaaaacttgtagccggaatcatgggttctgccgctctgacaagtttcttaacgggaattaccgagccgcttgaattctcattcttgtttgtggctcctatcctgtttgcgattcactgcgtattcgcgggactttcctttatggttatgcagctgctgcatgtaaaaatcggtatgaccttctcaggcggtctgattgactacttcctgttcggaattctgcctaaccggacggcttggtggcttgtcattccggtcggcttaggattagccgtcatttactacttcggtttccggtttgcgatcagaaagttcaatctgaaaacgccgggccgtgaagaagaggctgcggatgaaggtgcgggcgcctcaggcgaagccggcgaccttccttatgaaatcctgcaggcaatgggtgatcaggaaaacattaagcaccttgacgcttgtatcacgagacttcgcgttacggtcaacgaccagaagaaagtggataaggcccgtctgaaacagcttggcgcctcaggcgttcttgaagtcggaaacaacattcaggccattttcggcccgcgttctgacggtttaaaaacacagatgcaggatattatcgccggacgcacgccgcgccctgaaccgaaagtatccgcgcaagaagaagtcagccagcaggttgaagaggttatcgcagatccgctccgaaacgagcagggtgaagaagtgttcgcttctccgatcaccggcgaaatccatccgattaccgatgtgcctgaccaggtgttctcaggaaaaatgatgggtgacggttttgcgattctccctgaagaaggaatcgtcgtatcgcctgtccgcggaaaagtgctgaatgttttcccgacaaaacatgcgatcggccttcagtctgacggcggaagagagatcctgattcatttcggaatcgacacagtcagtctgaaaggcgaaggattcacttcttttgtttctgagggtgaccgggttgaaccggggcaaaagctgcttgaagttgatcttgaagcggttaaacctcatgttccttcattaatgacaccgattgtctttacaaatcttgccgagggtgaagcgatttccctttcggccgaaggtaccgtaaaacgggaacaaaaagatattgtgaaaatcggaaaataagcatataaatacgccgtgcttgtcagatgacaagcacggctgtatgatataatattgtgtagtaaaatagctttaatttaaaggagaatgataatcatggcacaaaaaacatttaaagtaacagcagattccggaatccacgctcgtcctgcgacagttcttgtacagactgcaagcaaatacgatgctgacgtaaacttagaatataacggcaaaacagtaaaccttaagtcaatcatgggcgttatgtctctaggtattgctaaaggcgctgaaatcacaatttccgcttcaggcgctgacgaaaacgatgctcttaacgctttagaagaaacaatgaaaagcgaaggactcggcgagtaatgcaagaattaaaaggaataggcgcttcagccggaattgcgattgcgaaagcataccggcttgaagagccggacttaacggttgaaaagaaaaacattgctgatgctgcggctgaagtaagccgttttgatgaagcgattgtacgttctaaagaagagcttgaaaaaattaaagagcatgctttaaaagaactgggacaagacaaagctgacattttctccgcgcaccttttagttctgagtgatcctgagctgttgaacccggtaaaggagaaaatcagcacagattcagtcaatgctgaattcgctttgaaagaaacagcttccatgttcgttactatgtttgaatcaatggataacgaatacatgaaagagcgtgcggcggatatccgtgacgtaacaaaacgtgtgacggggcacctgctgggcgtggaaattccgaacccgagcatgatctcagaagaggttgttatcgtggctgaagatttgacaccgtctgatacggcgcaattaaaccgccagtttgtaaaaggttttacaactgatatcggcggacgcacttcacactccgcgatcatggcccgttcgcttgaaattccggctgttgtcggcacaaaagcggctacagggacaattgaaaacggtgttacggtaatcgtagacggcatcgatggtgatgtgatcatcgatccttccagtgaaacgttaaagaaatatgaagaaaagcacagtgcttacctggcgcaaaaagctgagtgggcgaagctcgtcaatgaaccgactgtttctaaagacggccatcatgtagagcttgccgcaaatatcggcacacctgacgatgtaaaaggcgttcttgaaaacggaggagaagctgtagggctttaccgtacggaattcctttacatgggacgcgaccagcttccgacggaagacgagcagtttgacgcttataaaacggttcttgagcgtatggaaggaaaatcagttgtcgtgcggacattggatatcggcggcgacaaagagcttccttacctgcagctacctaaagaaatgaacccgttcttaggctacagagccatccgcctttgccttgaagagcaagaaatcttcagaactcagcttcgtgcgctgcttcgtgcaagtacatacggaaacttaaaaatcatgttcccgatgattgcgacagtaaacgagtttaaacaggcgaaagcgattcttctcgaagaaaaagaaaaactcgtcgaagccggcgtagcggtttctgacgatattgaagtcggtatgatggtagagattccgtctacagccgtgatcgcagatcagtttgccgcagaagttgacttcttcagtatcggaacaaatgacttgatccaatacacgatggctgctgaccgcatgaacgagcgcgtagcttatctgtatcagccatacaatccggcgattctccgtctgatcacccttgttattgaagccgctcacaaagagggcaaatgggtcggcatgtgcggagaaatggcgggagacgaaattgcgattccgattcttctcggcttaggcttagatgagttctcgatgagcgctacatccatccttccggcaagaacgcagatcagcaagctttctaaaaaagaagctgaatcattcaaagaaacaatcttgtctatgagcacgacagaagaggttgtcgcattcgttaaagaaacattcaataagtaatacaaaagccagacggtgtaagccgtctggtttttttcatattcggaaaaaaggggggaacaataactttcaacaggagggattattatgacaaaatcatttgcagcgggggatacggtctatgtgatttaccgcaatccgcatgcggccaatgttgcccatattaaagaggcggagatcgtccatcatccgtatcatgagggagaactgtctctgtttttatacgaaacctatcatccgctggccgaagatgacgcggtcttttcgacatatgaggaagcggaagcgctttacagcgagctttttgaagaagaccggtatcattgatcaaaggaaatgtttacaacgcatattcactctcttttaaacggaaagtaacaacatgaggatatgtaaagggagtgtctgtctatgttgaagccgtttgtgccccagcttgtttatattgaaccgagagcgctcgaatacccgttaggacaagagctgaagaataagtttgaaaacatggggcttgagatcagagaaacgacatcgcataatcaagtccggaatattccgggaaaaaatcacttgcagcaataccggaacgcgaaatcaacattggtaatcggcgtccggaaaacactgaaattcgattcttcaaagccgtccgccgaatatgccattccatttgcgacgggctgtatggggcattgccactattgctacctgcagacgacgatggggtcaaagccctacattcggacatatgtcaatgtggaagagattctggatcaggctgatgagtatatgaaagaacgggcgccggaatttacaagatttgaagcctcttgtacgtctgatatcgtaggaatcgatcatctgacacatacattaaaaagagccattgaacatttcggacaaagcgaattgggacagctcagattcgtgactaaatttcaccacgtcgatcatttgcttgatgcaaaacataacggaaagactaggttcagattcagcatcaatgcggattatgtcattaaaaactttgaaccgggaacttctccgctcgacaaacggatagaagccgccgtcaaagtcgctaaagcgggctatccgctcggtttcatcgtggcgccgatttatattcacgatggctgggaggaaggctataaggaactgtttgagaaacttgatgcggcgcttgatgaagacgttcggcatgacatcacatttgaactgatccagcaccgttttacaaaaccggccaaacgggtgattgagaagaactatccgaaaacaaagcttgagcttgatgaagaaaagcgcagatacaaatggggacgctacggaatcggcaagtatatataccaaaaagacgaagagcatgctttaagggaaacactggaatcttatatcgaaacctatttcccgaaagcgaaaatcgaatattttacgtaaggcggagctgtcggtacgacagctctttttttgcagcgccaaatggcggaaatttttgatatttatttcaaggtttattcattttcttggccgaaagaccgatataactctcaggaggggatggttatgtttaaaaaaatgcacatcaaaattgctgtgtttgtatcggcaatgcttatcgtaacggttgtttttttaacggtttcttcatatttgacattaaagccgatgatgacggaggaagcaaaacgtacgacagagaatgtcaccaattcactcggtcagaacattgagcttcagctgaaaaatgatgagaccgtattaatgagattagcaggcggtgaattgtcccggtcttttctatcagatgggaagaaagaaaccgcgcggctttttaacgatgagttaaaacagatcggacagaatgacaaatatgtcgcgcttgcgtacgtcggaaccgcaaacaaacaaatgtttacatatccaaaggccgactttgccaaagactatgatccgacaaatagaacgtggtataagatggcggccgaaaaacccgataaggttgtctggactgacccttacaaagatgcagtgacgggagacatgatcgtgacggcgtcaaaagccattcaaaacagcggaaccgtcgtcggagtggcgagcttagatctgaagctgtcctccattcagagcatggtcaacgagcaaaaggtaccgtataaaggatttgcgtttttggcggatgaaaacggctctcttctggcgcatccggaaaaacagggaaaaaatatttcggaagatcagacgttaaaagacatcactgcggataaagaaggcatcaaagagctgcaggggaacatggtcgtctaccaaacggtaaaagaaacagggtggaaagtcggaacgcagtttgaaaaagatcagctgatgggagtagccgacaaaatgaacacggtgagcatttttatgtcactgatcgcccttgtgattacgatcggactcagctatttccttgcaaaaacgataaccgggccgattcagcagctgatcgcgaaaacaaattcggtctcagcgggagatttaaccgtccgcgcccggacgaaatcaaaagatgaagtaggcgagttaacaaaagactttaaccaaatggttgaaaatatgaaagagatggtcgaacaggttaaggcctcctcagaaaatgtgtctgatacatctgaccagctaaccgtcatttcacaagaaacaaatgaaacgagcggacaaatcgcaaaagcgatagaggaagtcgccgccggagcgacagagcaagcatcagaggttgagacgatcaatgaaaaatcagaaaatctctcggtcaaaataaaaggaatcgcagatcgcgcaggcagcataaaacaactctcaaaatcttcagaggatgccagctacaaaggactggacgcgctcgggcagcttctgatgaagtcaaacgaagccaattcagaaacgaaaaaagtagaggcaatgctgaatgacctggaagaacaaacgaaaaacatagaagaagtcgtgacggcgatatccgccatttcggaccagacgaacctcttggcgctgaatgcgagcattgaagccgcgagagcgggagaaagcggccggggctttgccgtcgtcgcggaagaagtccgcaagcttgctgagcaatcagctctttcttccggccatatcagtgagacggtccggctgattcaatcagagacaaaagaagcgtcacacgcgatgattgaggcaagcagaatgaatgatgaacaaaacagcgccattcatgaaacgggtgaggtcctcaatctgattacgacggaaatgcagtctctcgttcaaggtatagatcatatttacaatgacattcaaaaaatgagtgaagaacaagccgcgattcaagaagcgattcaaagcatctccgccatttctcaagaatctgcggcagcggcggaagaagtgaatgcttctactgatgaacagctcgttacgcttgaaaaagtaaagcaatcgactgatatgctaaagagcgcaagcgaagatctgatcagcgccatttctaaattcaccttgtaatgcggtctctatcagcctataatatggtaatatagacatgaaagaataatattatgaatcgcatcaggggaggaaagcgcagtgaacaaaacggtcggatttatcggtttgggcgtcatgggaaacagtatggcatcgcacattttagaagcgggctatcctgttttagtctacacgcgtacgaaacaaaaagcggaagagattctgaataagggagcggtctggcaggagacggtcaaagacctttcagagaaagctgacattattattaccatggtcggctatccgagtgatgtcgaggaaatctatctcggcgaaaacggcattctccggcacgcaaaagaaggggcgtttgtcattgacatgacgacatcaaaaccgtctctggcgaaaaagattgcggagaaagccaaagaaaagtccattcacgccttggatgcacccgtttccggcggagacatcggcgcgaggaacggaacgcttgccattatggccggaggagaaaaagaagcatttgaagcatgcctgccgcttttctccgttatgggggaaaacattcagtatcaaggtccggccggcagcggccagcatacgaaaatgtgcaatcagatcgcgattgcagcgggaatggtcggagtggctgaagcgatggcttacgctgaaaaatccggtctgaacccggaacaagtgctgaaaagcattacaaccggagcggctggcagctggtcattgtccaacctcgctccccgtatgctgaaaggcgattttgcaccaggattctacgtgaaacactttattaaagacatgggaatcgcccttgaagaagcggagctgatgggagaagaaatgcccggattggcacttgccaaatcattatacgacaagctttccgcgcaaggtgaagaaaacagcggaactcaaagtatttataagctttgggtgaaataaaaaagattgcccggaggggcaatcttttttatttattttccgataaattgctgtgtccagatgtttcctgattctacgtaaccgacaccgatttgagtgaactcaggattcaggatgttctttctgtggccttcactgttcatccaagctttaacgacggcttcaggagtcgtctgccctttggcgatattttcaccggcggttttataagtgattccgaaagacttcatcatatcgaaaggtgagccgtaagtagggctttggtgatcgaaatagtttttgtctttcatatcttgtgattttgcgtgagctgatttgcttagtttatcatcaatctgcagaggttttaagccttgcttttgtctctctgcatttgtcaattcaacgactttcttttcgtacgcactgacagaagaaggagttttctcgctgctgttgtttgtgttatctgtctgctttgcattgtcagccgtctggttttgatcggctttcggtttttcggcagctgccggtgccgtttttgccggtgtttctttttgaacgtctttaactgtcatatcagaattctttgcgtgtttttgcagctgctgtttcagttctttctcatttttaacgttcagctgtttcacgctcgttttcatatgtagtttttcaatagcctcttgaagagtcagatgctgtacagtgtttccttttttcacggtaacgacgtgctggcatgacagctctttggcagatgcctgctgaatgcctccgaatgtaattaaactgactgccgcggcggcagataagagaaatgcttttttcatagttaatagcctcccagagaagtttttttctacatgaaaaatcttatcacagcttttttgtcataatgcaggcagccatttcctttgacaacaaacgtttgtcataattgtaattgagcacagaaaaatggctttatatcaggaaaaacgatctgtatttattttttaaaatccgttacatctcttcaaattatttgaagtgttagatatattttaagataatttgatcttgacagttttttttacccgttttcgctgtaacaacttttacaaaaatgttacaattaaaatctgtttatgtaaatatattcaatgatttgagaggtgtaacagaaagtggctgaagtcgcgcgcgaaccaaagaaaaaaacgaaacgttacagagcgctgagaatgaatctctattttttgattgtttttcttctctttacggcactgatttttaaactcggcatcgtccagattgtcgaaggggataaacaccgccaggatgcggagaaggcaaatgcaaaaaccgcctattatccgacaccgcggggaaagatgtatgacaagcggaacagagtggcggttgataaccaggctgtgcctgaaattgtatacgtttctacctcaaaaacctcggcaaaggacaaattgaaaacggcaaaaaatctcgccgcactgattcatattgatactgaatttatgaaggatcgaaatatcattgattactggcttgccgcacatccgaagaaggcggaaaagcttatgaaggattcagaaaacagcctgaaatcccaagaagtatacaaacgccagattgaacgcgtcccgaagcaggagattgatgcgatcaaaaaaaataaaaaagagctggaaatcgcggcgatttatacgcgtttttcaagcggcaacgcctatcagccgcaagtcgtcaaatcaatggacccgaataagctgaacggaaacggaaacagcggttcactgcttgacgagcatgaaaacaacaagcaaaaaccaaaaagcgacctgacatatgaagaagtttccgtcgtatccgagcacctgaaagagctccccggcattgacgtgatcaatgactggacgcggaaatatccgtacgataaaacgctgtactctctgttcggcggtgtgacgacaccggaacagggattgttgggcgaacggaaagattattatgtcacaagaggctactcactgaatgaccgggtgggtaaaagctacattgaatatcagtatgaagactatttaaacgcacataaagaaaaagtagagtatgtggaaaacagcaaaggtgaggtcgtcagccaaaagcccgtcgatgaaggcagcagaggctacgatcttcagctctcgctcgatatggaattacagtcgaaagtcgaacaagtcattgaaaaagagctgagaagaagccgcgccgcgggcaactttatggttgacagaggatttgccgtcatgatggacccgaacaacggggatattctctcaatggcggggaaacgcatcgatctcgaaacaaataaaacacaggattttgcgatcggatcatttacgacccaatatgagatgggctcttctgttaaaggagcgactgttctcgcgggttaccaaagcggcctcccgcattataaaacgtttgtcgatgcaccgcttgtatttaaaggcgacacgaaaaaacaatcgtggacacaaatgggagccattactgagctgactgcgctgcaaagaagttcaaacgtatatatgtttcatgtggccatgcatatcgccggcattacttacgtcccgcacggtacgctgcctgccggattagacgatattaaaaaaatgcgcaactactacgcccaattcggtttgggtgtgaagaccgggattgatcttcctcaggaatcagcaggcatgcagtcaaatccgcaattggtcgggggattactgctggattttgcgatcggacagtttgatacgtatacgccgcttcaaatggctcaatatatttcagccatcgcaaacggcgggtatcgcgtccagccgcggatcgtcacaagcattcatgaaccggacagcaaaaataagattggaaaagcgattgaacagcgagatattaaaattttgaacaaagtaaataacagtccgagcgattttgatcaggttcataaaggaatgaaattggttacaagctcatctcaaggaacggcttattcaacattccaggggtccggcgctgatgtttccggaaaaacgggaactgcgcagacgcgctattacggcacgaacaaaaactggtgggggaaagacacttataacctgacctttgtcggctattatccgtcagaacatccacgagtggcattcagcgtcgtcgtaccgactgttcaggatgatcacgatcccgtcagcaaaaacattgccaaaggagcaattgacgcttacaaagaacttgaaaagaaatacaataaaaaataacaaatgaaagggcggccgaacatctcgtgcgccctttctttcattcaggaaaattgacgttcacaataagaatagaaggagaatgctcattttttagcgaatcaatctagtggaatttctttttatatcagtccgtgtccagcctgcagtgcgagtataatgcaaaggagggattctgtggaacaggatactcagcatgtcaaacagtttcaatcgaaaaccgatcttcatgccgttttgacgtctaacgggcgtattatgtatatttctgcaaactgcaaattgtacttcagttattctcaggaagagatgatcggctcatttctcaaaacgttcctgcatgaagaagatcaatttttggttgaaagttacttctataatgagcatcatttgatgccttgcacctttcgtcttattaaaaaagatcataccatcgtatggcttgaagcgggtgtggaaattgtcacaccgcaaatggaggggacggatcgggaaatcatcctcaaaatcaaggtgcttgaggagaagacgccccgccggccttatatgtatgaacaaaagaagcaaaaggcagaacaacagtcggaagatgcggctggaaacggcgaattcgagcgtcttgtcgaaatgctgccgaatcctttatatgtcagcatcaacggcacaatcgcctacgccaacaacgcgatgcttgccatgctgggagccgagagcaaagacgaggtaatcggcaggcgctcttatgagtttattgaagaagagtatcacgacattgtgaaaaaccgaattgtgcggatgcaaaaaggaatggaagtcggaatgatcgaacagacgtggagaaggctcgacggcacgcccgttcatttagaagtgaaagcggcaccgacgacatataaaaatcagcgggcggaattgctgcttctgattgatatttcttcacggaaaaaattccaaacgattctgcaaaaaagcagagagcgttatcagctcctcattcagaattcaattgatacgatcgccgtgattcacaatgataaatgggtattcatgaatgagtcgggcatttcgctgtttgaggctgaaacatatgaagatttaattgggaaaaacgtctatgatcagcttcatccctgcgatcatgacggcgtgaaacagcggatccaaaatattatcgaccgaaagaccgagtcagaaatcattaagcagtcgtggtttacctttaaaaaccggctgatctacacggaaatggtctgcattccgacgacgtttttcggagaaacggccgtgcaggtcattctgcgtgacatttctgagcggaagcagacggaggaattaatgctgaagtcggagaagctgtctatcgcagggcagctggcggcgggaatcgctcacgaaatccgcaatccgctgacggcgatcaaaggatttttacagctcatgaagccgacgatggaggaaaacgaacattactttgaaattgtgttttctgaactgagcagaatcgaattgattttaagtgagcttttaatgcttgccaaacctcagcaaaacgccgtgaaagagcgtgtaaacttaaagaaaattataagtgaagtgaccgctcttttagagacgcaggcaaatcttaaagggatttttatcaaaacggattacgaacatgacagcatgtatattaacggtgatcaaaatcagctgaaacaggtgtttatcaatctgattaaaaatgccgttgagtcgatgccggatgggggaacggttcacatcatcatgacagaagatgagtattccgttaatgtgacggtgaaagacgagggtgacgggataccggaaaacgtgctgaaacgaataggcgaaccgtttttgacaacgaaagaaaaaggaaccggcctggggctgatggtcacattcaaccttattaaaaaccaccagggagccatccaagtagacagcaaaccggatagaggcacggcctttcatattacattcccgaaacaataaaaaacaacggcgttatgccgttgtttaaatagtctgcatggattctctcgtttttaaaataaatgcttccagccggtccaagccttctctcaatgtatccagtgaatatgcgaatgacagcctcacatacccttcacccaactttgaaaacgagctgccgggcacaagagccacacctgcatcctctaaaagagccatactaaaatcaaacgatgacattccgaatgacttaatggaagggaagatataaaatgcgcctgacggctttacgacgtcaagccccattgaaacaagacggtcatatacatagtcaagccgctttttatactgttctctcataataagcgcatcatcaacaccgtttgtcaccgcttcaagagccgctttctgagagattgaagacgcgcatgtcacactgtattggtgaacttttaagatgtgcttggcaatttctttcggtgcgaaaatgaaaccgattctccagcccgtcatgctgtgtgattttgacaggccgttgatgacgatcgtctggtctctcaaataagacgcgatcgaataatgcggtctgtcataggttaattcgctgtaaatctcatcagacaggacaaaaacatttctgcccttcaggacggctgcgatgttttgcagctcttcctcagacaatgtcactccggtcggatttgacggataaggaagaatgacgcattttgtttttggtgtcagcgattcttcaatgagccgcgccgtcagcttaaatccgtgtgtcgtcgtatccacatggaccggaacggcgcccgacatgcggatgatcggttcgtagcccggatatatcggtccggggagaataacttcatcgcccggagataaaatcgtccgcaaagacgcgtcaatcgcttggcttgccccggttgtgacgatgatttcagtttcagcttcataattcaaatcagcttttttcttcatataaagctgtacggcctgtctcagctcaaggccgcccgcattcggagtatatgccgttgcgttatcgtcgattgcctttttggcagccgctttgacatggtgcggcgtgaagaaatccggctgaccgatcgtaagcgaaatgacattgtcgtgctgagctacaagatttgagaatttgcgaattcctgaaatttcaatttcttttacattcggattaagcaaatgttccataattcatcaccttatactatatattgagtttctcctattttaccactagctgagcatttgtcatctttttattgaactatcccgagtatatgtccgatatgtgaaaacataccttctttcagaaaaaaataagacaaccagctgaaatgattgtcttcattgtatcatgatctatctattgtgatatgtggcgaatgtcattaatacccgtattcaaagctgacgtcttcccgccataagatgtatggagcgggcttgtcgggacgctctttcgcctcttttttcatttgcaggtaagccgttttgctgatatcttctaacaccgtcatttgatcttggtcgaatatgactactgtacccatttattacacccttcttcctgaaaaatccttgactattttaccactcgatgtcaaaaagtcaatgggatatcagaaaaaagcatttttttataaagagttcatggccagttggaccgaatacattcactttttccgtttccagccgatatatacagtacaatactgaatgcggatagcgagggattgaattgtctttacaacaatacgatattttattggattcaggcacaaacgaattagaaatcgtcaaatttgaagtaggcgtcaatacatttggcataaatgtgatgaaagtccgggaaatcattcagccggtagatgtcacatctgtgcctcagtctcataaagacgtagaagggatgattaagctgagaggcgaaattcttcccgtcatcagtctgtatacctttttcggcgttgatgccgaaggagcaaaagacgataaatatatcgtaacggaattcaacaagcggaaaatcgtctttcacgtcggttccgtttcacaaatccacagggtgtcctgggaggcgattgaaaagccgacttccttgaaccaggggatggagcggcatttaacgggaatcatcaaactggaagacacgatgatctttctgcctgattatgaaaagatcatttacgatattgaatcggcatccggagttgagacttatcatgtccatcaggaaggatttgatgaaagacgggcgggtaaaaaactgatcatcgttgaagattcgccgcttctgatgcgtcttttgacggatgagctgactgaggcggggtatagtgaaatcgttacgtttgaaaacggaaaagaagcgtatgattacgtcgtggaactgacggataacggagcaaacctgtcagaccatattgacatgattatcagtgacattgaaatgccgaaaatggacgggcatcgtttgacgaagctccttaaggataacccgcaaagctctgatgtgccgattatgattttctcgtccctgattacggacgacctgcgccaccggggcgaagtagtcggagcggatgaacagatcagcaagcctgaaatcagcgagctcattaaaaaagtggatacgtacgtgattgaatagaaaaaagccgatgcatgacgcatcggctttttttgcggcggaattaaaaataactctcaccaagttttttaaatacgggtttatgataagcgggctgctgcctgttggcggcaagcggtttttcctttaagcccacatatttttgcaatacgtttttcgcttttgtcaaagacatttgtgctttaggattgcggtacgattgatttaacgtacccaaatgcggaagatgctggaagtcttcttttgttggaggcatgtgaaaatagtagtctccgatagagataagtacgtctgactgctgttggctaaacctgggattatttgaaaagtgaagccctatttttttccctttgccttctttcacaagcttttgtaatgcccgttttttcagcagataaaggtatttagggttgggggcggtttttgcatggcggttcacagtataaacagcttttgaaagattctcgatggttggctgcagctctttcgaataagcgtggtcgtccattatttctctcctttgcattgatcaagttcatatatagattatacttttttagcgttgaaatgcaaatattgattataaaaatacgcctttttctgatgaaaagggcgcatctttttcctttattagacaggttttgcatgtttttcagaatcagcctttaatgattgctgcacatcgatctctgctgcctcggcgctgtatttcggaagagcgataaaatagaacacaaataccgctaaaatcacgattcccatgccgtaataaaggtaatcaatattggtaacgaatttcggaaataacagggcgaccagtccgagtgtaatcgattgggcaaacatcataaaagggtcctgccagccgctgacccggcccattattttcggatgaacgattttcggcatccagccgccgatggcgatattgacagggccgatgcacatgccgaggacgaaagccgccatataataaatccacagcttatccgtatagccgaggacaaaaatgagcagtccggctgccaaaataggaatcgacatcaaatgatgcggtttgactttttttgcgatcatcgttccgatcacacttcctgcaagcaggccgaagccgagtgcgacggtgaagatggaagtatgtgattcgtaatgatcaggcgcaagtccgtatttcatcgtaaacatcggcagtacggcaaagccgccgttgacaaaaccaaagataaaaaagccgaaaataagggaagcaagcaatttgtttttaacaatatatacgatcccttccttaaaatcagcgaccgagtctttcagaaacgaatctccccatttaaaagggccgttcggctgacgggcttctttcggaatgcggcacgcgcggatcagaaagcctgatacaataaagctgacaaaatcaaggataatggctccgtgaataccgatcgttttatacataaacgcgcctataccgacgccgaaaaccatgaagatgctgaacaggatctggttaagtcccgccgctttcgcgtaatgctccttaggcagaatagcttgtacaaggctggcttccgccgggaaaaagaacttggtcacggcgcttctgatgaacaaaatacagaacacgagagggatgctcccggtgtataatgcggcaaacaatacgatcgtcagtccggctctgatccagtcacaattctctgcgacctttttcctgtcaagccggtcagctgcgacaccgacaatcagaaatacgaaaactgtcggcagtgaatacatcagctcagccaaagtcgtgtatgccggctggtttgaaaaatggtccagcaagtaaaaagcgaaagccatattacctacagtcgttcccatttgagaagcgagtgctgcgaaaaagagacggacaaaattgcgatttttaaatatatccataaacacgctccttaccctaaaggtcccactgtaatatattatcatcagctcgttccattaacaaataagatctttctatcttataatagtcacccttgttccattaggaacggcagcggcaagttcagtgacgtcctgattatacatccggatgcatccttttgataccgctttgccgatggaggaaggattatttgttccgtgaatgccgtaatgaattttagagaggctgagccaataagcgccgaacgggccgccgggcttaggctggcggttcacgatgtaaaattctccggtcggcgtggtcgtcaatatttttccgactgcgatgggatacgtacggatgagcctgccaaggcggtataactccagtttcttcgctccgatatacacgatgatggagtagggaatggtggatgggtcgggaagattcggtatgataatatgctgtcccgcgtatatgaccgattggattgagggatttgcctgaaggagagcagcagtgcttattctgaagtcttgcgcaatgcttgagatggtttctccttgtttcacttgatatgtcagcagtttcatcaccctcctttttgctcttttccatatacatattacggagggggtgtctgtgcatcaggataaaagtcttatttttgctcggttttcaatgtgaacagcgtgatttccggtctggctaaaaatcgatacggcagtcttgtcgtaccgagcccgcgattgacgtaaacggctgtgtcatgcagtgtatacatgccgtcggtatacgtttttccgtaaggaggcgtaatgagagggccgaaaaacgggagctggacctggccgccgtgagtgtgtcccgacagctggaggtttacgggatatccgcctatcttgagagcggcatcaggctcgtggacgattaaaatggaaaacgcatcttcggaaaggcgtgacagggtgccttcataatcgggttttccgagcattacatcatccaaaaacgcgaattcaatccggcttccatctgtcagctgcacctgacggtagccgtttcgaagcacttgaaaatcagccgcttccatcagagccttgtacgtgttcgtaccgtagcctccgtggtcatggtttccgtaaacacaaagtttgccgaagggagcttcaagattttgcagcacggcgagtgcatgctggtgatcattaaataaatgcggcttatcaattaaatctcccgtaaagatgagcagatcgggtttcagctgattgatcttttccgctgctttattcaagtcaccggatgtaaacacatcactgagatgcgtatcgctgaattgaacgattttaaaattgtcaaagccgcgggggatcaggcggttggtgattgtatgccgggtgatttcaatcatgcgcggttcgatataccgggcatagccataacctccgcaagctgttgcaagagccgcacccaaaatgccgaatcctctttttaaaaatgttcttctcgtcattttctccatatgtaaaaccaacctttgtcagagttgttctattatatcatcagcctggctgaaaaatcccttctcagtatgtaatgacgcggaaagacatctatgataaaattatgaatgattattcattcaataaaaggggtgggtttgttatggataagaaagcggtaatcattacaggcggttcaagcggcatgggaaaagcaatggcgaaaaaacaggctgaattaggatggcacgtcatggtgacagggaggaaccatgaagcacttgaggaaacaaaaaaagaaattgagacctttgaggggcaggtcgcctgttttcaaatggatgtccgttctgattccgccgcttcagacatgattacagaagcgaaaaaagtctttggccggctcgatgcgctgattaacaatgcggccggcaactttatttgcccggcagagaagctgacgcccaatggatggaaagctgttattgagattgttttaaacggcacatttttctgcagccaagcagcggcaaggcattggatcgagcaggagcagaagggcgtcatcttaaatatggccgctacatacgcatggggagcgggagcgggtgtcgttcattccgctgcagccaaagcgggggtattgtcactgacaagaacgctggccgttgaatgggggagcaaatacggcatccgcacaaacgcgatagcccccggcccgattgaacggacaggcggtgcggagaagctgtttgaatcggaaaaagcggtgtcccgcactatgaacagtgtgccgctcggccggctgggcacaccggaagaaatcgccgcgttggcagcgtttttgctatctgatgaagcgtcctatataaacggggactgtatcacaatggacggggggcaatggctgaatccttatccgttttaatttttcatatattgattattttgcaaaacaagcgaacgttaaagccgccgttcgcttgttttattttctattcaaaattatgatataattttgaaagattaaggggcgattaattgaagaaattattaaaatggttcgttgtactatttgtaagcagtttcgttatcatctttaatatttggtactttattatttgtgcttttactccggagtattatcaaaataccaatcttacatctgatgaaataatcagatttgaaaagctatatcacatcgattttcctgatgaaacgaaatttattaaagccagggagtatttgagtgggctcggaggcgatacatcggctgtattatatgtgtctctgccagccaagctggcggaaacaattttatctgattacacgtatatgccaataaatcatactgatactgccggttcaatgtatggagttgacgtttccgagagtgttggcgggttaacaactcttacatttggcactttagataaaaaaggaactttctttcagttgaaacatgatgatgattggatatttaacagcactgattggagccattatttttggacagctgccggttataatgctcttatatttatccttttatttgtgattgtgaaacaaatgaataacgtccttaattaaccggtctgaagagtgatcttaaaaatgtcccccttttattttaagctgcggccatactgcctccttttcccctaatcaaaacatttgtggtgctgatataattgtgtataatcagacaaagatagagaagcaggtgataacatgttggacccacttgatatactgacgaatattgatgatgtcattccgtattaccaagcgatttttaacgctgaggaacaaagagtcgtaggctacgaagtgcttggccggattttggcagatgcggagattgagagcctcgggccgtttttcttagattccggcattccggaagaatataagcttgaggtcgatgacagagtcatcaggcaggcgctggagcggtttaaagaagctgaccgtgatctgttgatttttatcaatcaggatgcgaatgtattgatgcttgaccacggcgaaagctttcttgagcttttgaaagaatacgaagagcagggcattgaattgaaccgtattgtgcttgagatcaccgagcacaatttcgaaggcgacattgaacagctgtaccatatgcttgcctactatcgtacatacggcattaaaatcgcggtggacaatataggtaaggagagcagcaacctggacagaatcgcgctcctttcaccggaccttctgaaaatagatttgcaggcgctgaaggtatctcagccgtcaccatcatatgagcatgtgctgtacagcatttcattgctggcgagaaaaatcggcgccgcgctgctgtatgaagatatagaagctgatttccagctccagtacgcatggagaaacggaggccgattttttcaaggctattatctgcaggcgccgagcggggattttatagaccggagcctgttaaaagcacgcttgaaaacggagtttcagcgatttattacgagagaaaaaaagaagctggaaacggtatatgaacactctgagaatttttataagcgggtcaatcaggcagtttccgagctgaagaaaacccatcaggcggacgatgagtttattaaaaaactggcggaaaacctgacggactgctgtttcagaatttatatgtgtgatgaagaaggctatcagctgacgggaaatgtgttcaagcagtccggcgaatggctttatcagcctgaatacatggagaaaaactggagctggcgtccgtactttttagaaaatatcatgaagatgcggaattcaagaaaaggctttttcagtgacctgtacagtgatattgagacaggtgagatgatcagaaccttttcatacccgatggatgacaatatgtatttatttatcgatctgccttactcttatttatatgaacaggacgggttactttaaagcggctgctgtatgccgctttttttgttcatttgaaaaaagttttaaaaaacgattgacaatgatactgataatcattatcatttagttatagagagaagttactctctgttccccaacccctctatcagatcaagatccgaaaaaacttggcgctacccccgccaagtttttttatgctgtctcctcataaaagggcttctccttacatacatctgataatggcggctcaaaaagcgaaaaattatttttgaaaggtgtatgacattccgaaaaaagcttcaaactattcgaaaacacggttttcccgtttatttctttttgaaaatccagcgggaaaatgccatcccggtctactttatggtatgatgctctgtagaacttgtattataataaatacttgttgatttgaagttgttttttgaaaggagtctttttttagaatgtcacaattaatgggtatcatcacacggctgcaaagtctgcaagaaacagcggaagcggctaacgagccgatgcagcgttattttgaagttaacggcgaaaaaatttgcagtgttaaatatttcgaaaaaaatcaaacgtttgaactgacggttttccaaaaaggtgaaaaacctaacacatatccgtttgataacattgacatgatttctattgaaatttttgagctccttcagtaatttgatttgatttttcaggctgaccaagcttccggtcttccgcaagcggagctttattaaattatgcaaaggaacgtgcttgttcgtttggttgtagactctggaaagaggagtgtccgtacatggctgattcttttctgttttataatctttctgaggcacagatgacctttcaagacgtgacggagcggctgaaacgctttgtcaataaagacccccgttcagcatatgtgctgtctgtagggactgattcacaagtttaccgcgacttcacaaagtttattacagctatacacttgcaccgtacaggcaagggagcttggggctgtttgaaaaatcatgatcttgcaagaccgatacatagccttcgtgaaaaaatttcgctggaaaccgcgttcagccaggagatggctgcgcatatcctcgacggccgtcttatggaactgacagatttgctcttgccttttgcggatgaaggggcggatctttcatttgaagtgcatctggatatcggtcaaaaagggctgacaaaagaattgatacaagaaatgaccggccgcattacctcgatgggcattgaagcgaaaatcaagcccgattcctgcacagcattcagttatgccaatcgttacacaaaataatatttcatacagaatccgcaaaatgtcgaattatgcggttgacgatttttttctgtttacttattctagcggtagagctgaaagcaaatttcacattgctttcggaggtattcagttaaaaatagggggcctgattacgtatgagtcttatcggtgaacgatttacggaagaagaacagaaacttctgctgaatatcctgatcaatcaagaatatgccattgagcttttgaccagcgaaatcaacgatatagaagcagggtcaaaaagcgtcgatggaaccacttataaaaaactcgtaacgctctatgaccgttttcggaatgaaaattaatcagcggcctataaattgatactcgattgcaaagagtatcttttttattgacggaaacttttcgacaaaaaatgataatgtttatattattgcaatatagggaatacatgctttgatgaaaaatgtaaaggggtcgaagtgacatgattagcttacaatcagatcagcttcttgatgcaacagtcggacaatttatgatcgaggcggataaagtggcgcacgttcaagtcggaaacaaccttgagcatgctcttttagtgctgacgaaaaccggctataccgccattcccgtccttgacgcttcgtaccgtctgcacggtttgatcgggacaaatatgattatgaacagcattttcggacttgaacggatcgagtttgagaagctggatcaaattacggttgaggaagtcatgctgaaagacattccccgtctccacatcaatgatccgattatcaaaggattcagcatggtcattaacaacggctttgtctgcgttgaaaatgatgaaggcgtctttgaaggcattttcacgagaagagtcgtattaaagcagttgagcagccatatcagatcattgaataagtaggctcgcacgatcagcctatttgttcttttgcatgccggaaaaagaaaacgcatacatatgagtggcgcttgcctcggcagcctttattttattagaatggtagataagaaatacgaaaaggcattgaaaaggaggacgacatgcagcttcaagagcttcatatgctcgtagttttagctgaggaattaaacatgaggaaggctgccgaacggttattcgtgtcacagccggctctgtcccagcgattgcagaccattgaaaaagcctggggaacaaagatctttctaagatctcaaaaaggacttacggtaacgccggcaggagaaaaaatcatacaatttgcaaatgacgtcacggatcggcaagaaagaatcagagaaaacattgatgaacttgagggtgagattcacggcacattaaagcttgccgtcgcctcgattatcgggcagcactggcttccgaaagtgttaaaaacatatgtggagcgttatccgaatgcaaaggtctctctcattacagggtggagcagcgaaatgctgaaaagtctgtatgaagatcaggtacatatcggcattatccggggaaatccggaatggaaaggccggaaagattatttaatgaccgatcatttatatttggttgatacggaaatttcctgtattgatgatattgcccataccgatcggccgttcatccaattcaaaagtgacagtacatattttcaggaaattcagcattggtggcatcaaaaattcaaaacctcgccgaaacagaccatcctcgtcgatcagattgaaacgtgcaagcagatggcgctgcacgggatcggatatgctattctgccgtcagtcaccttagaagaggaagacaaagtaaataaaatgcccctgcttgatacaaaagatcatccgatcggccgtgacacatggctgctcggatatgagccggcatttgaattaaaacaggtgcaggcttttgtttctgtcattaaagatatgctgaaacaggaacgcccattttagaaagacagcaatcatgctgtctttttttattttttattgacaatgaaaatcattatcatttaaagtgttatatatgttaatgaaaatcattatcaattacgaggtgatcatatgcagaaagcattaatgatatacgcaagcatgtcggggaatacagaggatattgccggcattataaaagaaacactgagcgggcatcagatagcagttgactgtctcgacatggacgaagcagatgcggattctctcgaagcatatgattatgtttttgtcggcacgtacacatggggggacggtgatcttccttacgaagcggaagatttttacgaagatattctgcatagccagctcaacggactgaaaacggcctgtttcggttcaggcgatcacgcctacccgaagttttgcgaagcggtcacgctgttttgcgatgcgtttgaacaggccggagccaatttatatccggaaacgctgaaaattgagctggcgcccgagacggctgaagatcaagaatgctgcaaagaatttgtccgcggttttcttgcatgggccgctcaccacggagaccggtgccatgtttcataaaggcgcgacggctgtcatggcatcagtgacttcaggatattttgtcgcagtgaaagacgaaggtatttttcatttttccgcggaagaaggctggaaaagactattccgagtgaaaagcagaattcatgtgctgacttacatagggccttacatattcgcggctggagaaaaaggcgccgtcctcagatcagccgatcagggaaagacttggacggcctcccggtttccgaccagcgcctccgtatgggccgttgccgggcggaatgacgggtttgtctgtgcgcacggcacatactgcctctacttatctgatgatttcggcgtcacttggcatgtggctaagcccttttcacaattaaaggagccgcctgtcatccgttcgctttgtttacacggtcagacgatttatatcggcacccggattcatatgaatcatggcggcatttgggcgtatgatctgacggaagaccgcatccggcgtataagctgcgaaaggcagcgcatgacggcttcaatgatgatgtatcagaatgactggctcattgcagcaaagggcgcggcaaagggagaacggggcgaggttgccgtccgaaacgtgcggacgcaagaggagtttgccattacagccggacccgccgtacgggaaaaatcatttctcgacgtttctgaggataacgggattatttatgtcacatcgacacaggacgaaaacggattttcgcgtatttatcaagctgatctcgccgccggtgaattaaagtggtttgatacgatccgcggtcacggatggcgggtggccaaccgggaagaaaactttttttgcgcgggcctttacgaaagtaagtttgtcagaccgtatgaggcggttcggctcgcacattagtttttatgcataaaggagagacgaagatggggaatgtattgcttgtttacgccacaatgtcaggaaacaccgaggcgatggcggatttaattgaaaaagggctgatcgaagcacaagcatccgtagacagatatgaagcgatggatattcatgccgaactttttaatgattacaagtatattttattaggcacatatacgtggggagacggggatcttcctgatgaaatgctcgatattgctgaagatatggaaaacctggagtttacgggaaaaacatttgctttgttcggttccggagatacgtcctatgagtttttttgcggggcggttgacgaattggaaaaagtaatcacagcccgcggcggacgggtggtgctgccgtcggtcaaaattgaaaacaaccctgagggcagtgaggaagaagagctccgggaattcggaagacagtttgccgcgctgtgcagccagccggcagaataaaggcttgttcctttttttcttgtctttgtatccttcctttgttacagtaatgaggtagaaaatcagaggaggacaatacatatgaaaatgatggatgcaaatgaaattatttcatttattcaaaatagtacaaaatcaacgcctgtaaaagtgtatgtaaaaggcgatcttgaaggaatcagctttggagattccgctaaaacattcctgaacggccaatccggcgtcgtttttggcgagtgggctgaaattaaaagcgcaatcgaagaaaacaaagacaaaattgaggattacgtcattgaaaatgaccgccgcaactctgcgatcccgatgcttgatttaaaagatgttaaagcgagaatcgagcccggcgctattatccgcgaccaagtcgaaatcggcgacaatgccgttatcatgatgggtgcgtctattaatatcggttcagtcatcggcgaaggtacgatgattgatatgaacgttgttctcggcggacgcgcgactgtcggcaaaaactgccacatcggagcgggttctgtattagcgggcgttattgagccgcctagcgctaagcctgttgtcgtggaagacgacgttgtgatcggcgcaaatgcggttgtgcttgaaggcgtaacaatcggtaaaggcgcggttgtcgctgccggagccatcgttgtaaatgacgtcgagccatataccgttgtagcgggaacacctgcgaaaaaaatcaaagatatcgatgaaaaaacaaaaggcaaaacagaaatcaaacaggaattacgccagctgtaaggaatggtttgatagaatgggcgtggatgataaaatccacgccttattcttatctcaaggaggaatacatatggaaaaagagcggctcattgccatccgaagagatctgcaccgcattccggagatcggctttcaggaatataaaacccaacagtacctgctgaatctattgaaccaatatccggaggaaagaattgaaatcgaaacttggagaaccggcatctttgtcaaagtcaacggcacggctccggaaaaaatgctcgcctacagagcggatatagacgctctgtcgattgaagagcagacggggcttccgtttgcatctgaacaccccggttttatgcacgcatgcggccacgatatgcacatgaccatcgcgctcggcattattgatcattttgtccatcatcccgtcaaacatgatctgctctttttattccagccggctgaagaaggaccgggcggagcggaaccgatgcttgaaagcgatgtgctgaaaaaatggacgccggatttgattaccgctctccatatagcacctgagcttcctgtaggcacaatttccaccaaaagcggattgctgtttgccaatacgagcgaactcgtcatcgatcttgaggggaaaggcgggcatgcggcatatccgcatacagcagacgacatggtcgtcgccgcgagcacgcttgtcacgcagctgcaaacggtcatatccagaaatacggatccgcttgacagcgctgtgataactgtcggaacgattaccgggggcacggcgcaaaatatcatcgcagagcatgctcatctggagggaactatccggacgctttccgaggaatcaatgcgtatggtgaaaaagcggattgaagagcttgtcaaaggaattgaaatcggcttccgatgcaaaggaaaagtcacgtatccgtccgtttatcatcaagtttataatacaagcggcctgaccgaagaatttatgcaatttgtcagcgatcatcagcttgctgacgtgagaacggcaaaagaagcgatgaccggagaagatttcggatatatgctgaaaaaatatcccggctttatgttctggctgggggccgattcatcccacgggcttcatcacgccaagctgaacccggatgaagatgcgatggaaaccgcggtaaatgtcatggtcggatatttttcgaagtatgccaattaaatccgaaaagaagaataatctaacaaaaattgagcattctacataacggaggtgttcaatatgacgaaaaaaattggaattgaacaatctttatcggatgtagaacaggcgttaaaacaaaagggatatgacgtagtgatgatgaagactcctgaggatgcgaagaattgtgactgctgtgtcgtaaccggacttgacagcaatgtccaaggaattgccgatacgtcaactcaggctcccgtcattacggcttccggaatgaccgccgacgaaatctgcagcgaagtggaaaaaaaatttcattaaaaagaaaaaaccgaagcttacgcttcggtttttctattcggcggaagcggcgtttttaaaacggtcgagcgcgattttcatttctctccgcagtacgcgttcaacccgccattgctccatattttctgttttggcaatgattctgatcaccatttctgacgagcttaaatcctgaaccccgatgacgtccggcccttccttaatctgcgggagctcagcggctgctttgtcacacgcggtttgcaggatttgaatggtttcatcaagatttttttcaagcggcactttaatatcgacaagcgcctgcatcgttccgcgggaatggttgctcacattcgtaatgccccggttgggaagatagtgaagcgtgccgtcaaagctccggatttgcgtcgtacggagaccgacctgctcgacaatgccgctgtagccggcaaccgtaatataatcgccgacgtcgatctgtttttccaaaaggataaaaaatccggtgacgatgtcactgacaagcccctgagccccaaagccgactgcgagaccgaccacaccggcgccggcaatgagagcgctcggattgtagtgaaataaatccaaaatcatcacgataaaaacgaaaatcaagatgtatccatatacattaagcgcgaggcttcgcaaagtataagcgcggcctgtggagaggttgttttgttgctcgaatttctgaaacagatgcttgatcagcttttttcctgccgcccggaaaataaagtacgctaaaataatgagagccagctttatgatgaaaatcccggcagatgtgagaagcccggcccagtcaaagtgttttaaatcaatcatagtgatgtcttcctttcaagtctattgcggaaaaagctaaaagtcatatacccgtttttaaaataagataaaccttttaatagaaaccagttatttcatttatgatttgttcatattgcccggtttcaatatcatcatttttgtgaagatatgaactaaggaatcgccacactcattttaacatggtgattcagccaaatcatatcctttggagggaaaacaggagaacgttgcccggcgaaactgaaagccccggcaaaaaacctttttcataaggagggaaataagatgaaattacgtcagcaaatgcctgaattgacaggcgctaaagcatggattaacagagaagtcacgaaggaacagctggtcggcggaaagccggcactgattcacttctggtccgccagctgccgcatgtgtaaagaagcgatgcctgagatgaacgaatttcgtgataaatataaagatcagctgaatgtggtggccgttcacatgccccgttccgaagacgatcttgaccttgagaaaatcaaggaaacagcggctgaacacgatatctctcagccgatttacgtcgacagcggtcatacgctgactgaagcatttgaaaatgaatatgtgccggcttattaccttttcgataaaaccggacagctccgccattttcaagcgggaggaagcgggatgaaaatgcttgaaaaacgcgtcagccgagtactttcagaaacggagcaggcttctgagtaatcgggacaatctccgtcggactattgtctcggttctgcaaaccctttgccgtttaggtaacagggtttttttgtgcctattggataaaaaattccaatatggcatgtgcggctttaaaataagagaaacagccgtaaacacgctgtaccgcttgttttatcgatatcattatcttttacatattatagtcgaaaattgtagatatcacgctaattttcattaaacaagtaatttcaagttatattttgaaatggttgaataaattggaactttgtccagaatcccctatatgataaggatttttgtatataaagtaccattttcagaaaataagcaatttttcatagagtaaataaaatagtaaaatgataaaataatagttgataaaattacttttgtaatctaatatcttaataaaagcgtttaaatttttgacagggggttttacacatgtttaatgaaagagaagcgctgcgcttacgtttagaacaattgaacgaagcagaggtaaaagtcattcgtgaatatcaaatagaacgtgataaaatatatgcaaaactgagagaattagacaatacaggcagcctgtccgatacaaaaaaagagtttcgtccggagaaaaaaagtgactctctcccggtgcttgcagagcttgcagcacaggaaatgagaagctatcaaaagccgcaggcacagcctcaatcctcccagccgcagatgcagtctattacgtctcttcctgccggcattccagacggttctacaagaagaagaagaggaacggcgagaccgggatcaaaagcggcaaaactgcgcgaagcagcgattaaaacattgaaacgccacaatgcagcgatcaaaagttccgaactgcaaaaggaaattgaaaaggaaagcggccttgaaattcctaatatgacaacatttatgcaaagcttaattaaaatgtatccggaagtgaaaaaaccataccgcggccaatatattcttgagggagaaatttctcaggaaacagcagaaacggcaaatgatacggctgctgaataaaacagtaaaaactgcttgcgttactcaagcagtttttttgcgctttcccgcttattctgcggaagtgacgcatcttttccaggctttttttcaagcttgacgacatatttttggaaaggcttttcgccgtcagcacgttctttcaacgcatccagtttttcatcaaacgactgatcgcgggactctgattgtacaaattgtttttgcagggagatgacttgttcggtaacggctttaagcaagtcttctgcctgaacagtctctttggaaacagaagggatttccagagcttgttccgccggttccgccgtgcggctgtcaatatcagcaaaatggccggcaatccaagcatcactttcgtccagctgccgtttatacgaaagaatggtttcttgaaataacttttctttcgttttttctatttctacaagccgttcttttgtttctagtattcgatctctcatatgattaatttctattttaatatgtttaagctggtattctttttctatcatttgtgtttggagccgggtattttcgtctgcagcggcatgataacgctgtttcatatcttcgtgagatgtccgttcagtttgaatggcggtctcaagtgagcggatgcgggtatgtaagtttttattttcttcttcaaattttacatttgtaagatgcagacggtgcttttcttccatctcatttttccgccgaaacgtttcctgctgaagcagttcttgcagaatgacgattttatcgagcagcccggctctgatttcatgcaaagaacgttccgtgtcacttgtctgtttgtgtttttgagccatggcttccaattcgtcagaaagcttgtgaagccgctctttaatattggcgttttcctcctgaagcttattatttttctgatggaagtagcttgcttcaaattctgaaattaattttctgcatctggaaagttcggatttcaagtaaaggttctcttgagaagtgtcgtggaaaaacggaccggatattttcataagaaccatctccctcatgatgttaacactacaatatgggaaaggatcaacggctattcctcttaattaaacagacaagcaccgtaatattgtatttcggctgaggcgtttgctatgcttttatatagaatgggagagagatgacatgaaacgggtgaatgtaatattagcagggggagcttcccgaagattcggagaaccgaaagcttttgcaaagtggaagggcggcatgttttatgaacaggcgaaaaaagccttcggcggcggagaaacggtaattatcagccgccctgagcatataaaaaagttcttatcaaacagagagcggcatgttttggccgatgagccgcggtttcggggaatgggcccgcttgccggcatatatacggcaatgaaacaaacggaaggcgaaacatatacggtcatatcctgtgacacgccgctcgtgacaagaaaaacgatggctgcgcttgaaatgaagctgacgggaaatctggacgctgtcataccggtttgtaaaaacagagagcagcccctcttggcggtttaccataaacgggtgcaggatgtgctttttgatcagctgacacaaaacaaactgaaaatgacagacacgctgaaacggctgtctgtctgttatgtgcaggctgaagacatcggcgccgggccggaggagttcgctaatatcaacacacaggacgattacaccagacttttggcgcatgtcgagtcttcaaatcaagactgatcgggaagaaacatggtatgatggaaataaaaatgcaaggggacaacacagatggaagagcgctattcgcggcagacaagatttaagccgataggggaaaaagggcagcaggcgctggctgacagcagtgtcctgattgtcggagccggagccctcggaacagcagcggcagagggtttggcaagagccggagcgggccgtatggcgattattgaccgggattatgtggaatggagcaatttacaaagacagcagctgtatacagaagaagacgcgagacagcgcctgccgaaagcaatggcggccaaggcgcgtcttttggcggtaaacagtgatatacatatcgatgcttacgcggcggaaggtacggcggaaacgctcgaaccgctgatcgaacaagcggattgcatcgtggatgcgacagataattttgaaacgagaatggtcatcaatgatctggcgctgaaaacgaaaacaccttggatttacggggcctgtgtcagcagtcagggaatgtgcctgacgattattccgggggtcacgccgtgtttatcctgcctgtttgagcaaatgcccgtgggcggagcgacatgtgatacagcaggtatcatacctccggcggttcatatcgtctccgcttatcagcaggctgaggcgctgaaattgctgacaggaaatcatgcggcggtaaatcggcgctttttcacgtttgacgtgtggaataacaccaatatgagcataaatgtggatcagatcaaacgggatcattgcccttcctgcggcgcggagcccgtatatccgtatctgcagcctgaaaacaggccgaaagcaagcgtgctgtgcggaagagacaccgttcaaatcagatcggaagccttaaagaggctggataaagaagagcttgtcaaacgtctgaagcagatcggtaaagtggaagcaaatgaatttctgctgcacatggcgtatgagcgcttcagaatcgttatttttcaggacggacgggctttgattcacggtacaaacgatataaaagaagcaaattcagttctggccagggtgatcggactgtaggaaggggaggtattgctatgcttgaaaaaagaacgccgattcaggtggacgaagcagtccgccgggtgagccggtataaaaaacagggggataccgaatgggtggcgcttgaggacagtctccaccgctatttggcggaggatgttaaggcggatcatgatgtgccggcctttaaccgttccccgtatgacgggtttgccatcagggcgagcgattcaaaaacggcttcccgtgacaatgccgtcacctttgaagtcattgaccatatcggagccggcgccgtatcggaaaaagaactcggcccttatgaagcggtccgcattatgacgggggcgcagattccaaaaggcgcggatgccgtagtgatgcttgagctgacaaaaacgttttctgaaaacgggacgaattacatgtcagtgaaacgccctttccatgcgggcgataatatttcatatcaaggagaagatgcgaaaaagggcagctcgctattaaaaaaagggacgaaaatcacgccgggcgtaaccgctcttttagcaaccttcggctatgcttccgttcccgtggtcagaaagccggttgtcggcattatcgcaacggggaccgagcttcttcatgtcagcgatccgcttgagccggggaaaatccgcaacagcaacgctgccatggtgtatgcccaggtcattgaagcgggcgcggtgccgctgaacttagggaaaatttccgatgattttgatgacagctatgctgcggtgaaggaagctatgaaaaaagttgattttctgatcacgaccggcggcgtgtcagtcggcgattttgattttcttccagacatttataataagctcggagcggaagttctttttaacaaagtggcaatgcgcccgggaagcgtgacaactgtcgcccgggccgatgacatgctgctgttcggcctttcaggcaatccgtccgcatgttatgtcggattcaccctgtttgtcaaaccgatgattcagacgtggcttctgaatgaaaaacctcattccggatgggcggaagccgtgttaacaaacgactttccgaaaccgaatccgtttacgagatttgtgagggcatttgtttatcataaggacggaaagatgatggcgtcaccggtcggtctcgacaaatcaagctcagtcacatctctggccgaagcaaacgcgtttatccttctgccgggaggaacgagggggtatgaagcgggccggacggttcacgcgctcctcatccgtgatgagaatggaagtgaatggccgtggtcaattctttcccgatcgtccagatcgtaggttttcaaaacagcggtaaaacaacgtttattgaacgtgtgctgaaagcggcgccgaaagagtgcgatattggatgtttaaaacatcacggacatggcggagaaccggaacctttttctgacggaaaagactcggagcgtttttcaaaagccggggccgcggttacggcagtagaaggggatggcgtcctgcagcttacggcgcgaaaaaaatgggatctggcgggtttgatcagtctgtatgaatgtctgggaattgacggtcttctcatagagggatttaaacatgcgccgcatccgaaaatcattatgatcaaagacagcgaagattggcaaaagctgaagcatttggagcacgtgatcgcagttgtcagcagaaatacggagcatatgccggcagatgcaggcatgcccgtattccatgcggacgatccggctgccatgatgtttgtgctttcgcagctgaaaggggaatctgcttaaatggaacgttttcaaattacaagggagcctatcattgcggaaaatatcgtaaaaaaagttgaaaagcgtgaagccggcgccatcacaacgtttatcggcacggtcagagagtggactgcaggacggcggacggtgcggctcgaatatgaagcgtatgaaccgatggctgttcaaatgctttctcaaatcggcgatgaaatcagtgcgaaatgggaaggagccgaagctgcaatcactcaccgtgtcggcgtccttgatatcggagaagccgcggtcgtaatcgccgtgtcttctccgcacagaaaggcggcatatgaggcgaatgaatatgcaattgaacggataaaacagattgtgccgatatggaaaaaagaaatctgggaagacggagaagaatggataggcgatcagctggaaacaacgccctatccgaacggaaaaccggatttgcataaaggggaatcgcgatgattaaagtattattgtttgccgggcttgcggagcaggcgggaacaccggtcattgaacttgacgaaaaagagacggcggcgtctgctgtaaaaacgctgctaaaggaacggtacggccttcagacgattgacaatgccatgatcgcaatcaatgaaacatatgtaaaagacaacagcatcgtaacagaaggcgataccattgcctttatccctcctgtaagcggagggtgaaaaaagagccggatgtgcatcattgccatccggcttttttgtatataggcgctgaattccagagaatatctaaatgggatttaaagggatttgcgattgagctggttttgactgcatgaataggctgaagacagtgccttcacaaggcattgaacctcccgtcataccggtctgacaatgcttttttttacataattatggaacgtaaagctgagaatttgtgttacaatttagcataaatacgcaaacggcaaaaaaattgaaacttctctcagcctaaagcgtacgaataaacagaataatacataggaggcatcagcaatatggaaccaaacctggaaaaaagcaatacggcagtaacggaaaagccgtcaattttcggcgtcattacaagtcctgttgtgcagtttaaaagattaaaagaaaagccggtcatcggcattcctctcctgattgtcatcattcttatcgcggccggcagtattttgcgcgggcttgggatgaattatgaagaagtgctgaacagctcatctcttgacggtttgacggatgatcagattgaaatgaccaaaaccttcgctaaattcggctcgatgttcggaggaatcttcgggggcattatcgctctgtttatcgttccgctcatttactggctgtgcgtcaaaatttcaggcggcgtgacaacttacaaaaaaatgctctcactcagcctgtttacggcatttattaccaatatcggcttagttattaacggtcttgtcacttattttaccggtgcgggctcattgtatgccgttacatctttggcgagtgtcataccggccggagacggcgtcgcggtctttttaagcgcgttcgacattttcagcatctggagctatattctgctcgctttgggacttcgctatacaggcggcatttcgaaaaaagcggcctggacttccgcgattgtcctgtttgttattatgcttttagtttcggcagtcggaggactgttaagttcagtgacagcaggtgtataacatgaaaaaaatttggatcggaatcggcatcgccgtaattgttgcagtattcatcggtatcaatatttataagtctgccgctcccgcgggcggcagcgccgggaaaaaaatcgaaaccggaaccatggaaaacagagaaatctcctctacggttatggttccgggaacacttaaattctctaaagaacagtatgttttttatgaagcggataaaggaactcttgataaagtgaaagtaaaagaaggcgacaaagtaaaaaaagggtcgtcgttagtcacatatacaaatgagcagctcaatcttgataaagaacaaaatgagttgacagaacaatcaaaacggatgcaaatcgaacaagttgaagaaaaactcagagcattaaacagcaaggaacaagatctggcaaaacaagtgggagaagcggaagccaaaaaacaaattgaatccgaacggactgatctgcagcttcagcaaaaaacggcggaaatcgaattaaagcaatctgatttgcaaaagcagtctcttgaaaatcaggtggcgaatctcaatgttaagagtgagatggacgggacggtaatctcggtaaatcaagaagcggcttctaaaaaatcggatattcaagaaccggttatacatataggagacccggaacacctgatcgttgccggcaatttgtccgaatacgacacgctgaaagtgaaaaagggccaaagcgttacaattacctcagacgccattccaggtaaaacgtggaaagggagagtggcggctgtcggcctcgttcctgatcaaaagtcaagcgctgcttcgggggaaagcacggaacaagccgtccagtatccgtttcaggttaagctgatcggaaaccttccggaaggcaaaccgggatttaaattaattatgaacattgaaaccgacaaacggaaagccgatacgctgccgtcctccgcagtcaaaaaagacggagatgagcactgggtctttacggtaaaagacgggaaggccaaacgcgtgaaagttaaagtcggcgataccgcaaatcagcttacggagataaaagaggggctttcaaaggatgataaagtcattctgaatccggctgacggtttgactgacggaacggatgtgaaagcatagatgattcagctttcaaaggtgaaaaaaagctatcagatcggcaaggagacgtttgatgttctccgttcaatcgacttgacgattgaagaaggagaatatgtgtcaattatgggaccgtcgggatcgggaaaatctacgatcatgaatatcatcggctgtctggacagaccgacgtccggcagttacaggcttgcgggcgaagatgtttcttcatgcaccgaaaaagagcttgcggcggtccggaacaaatcaatcggatttgtctttcagcagtttcagctgctgccgcgattgaatgcaagaaaaaatgtcgaactccccatgatctacgccggtatcggcaaaaaagagcgtgaggaacgggctgagcacgcgctggaaaaagtcggtttggcggatcggatgcgtcacatgccgaatgagctgtcaggcggccagaagcagcgtgtcgcgattgcaagagccatcgtgaacgaaccgaagctcattttagctgatgaaccgaccggcgcactggatacgaaaacaagcatttccattatggagcagttcacagagcttaatgcagagggcgtgaccgtggtgctcgtcactcatgagcctgaagtggcggactgtacaaacagagtgattttcgtccgtgacggcatgatcgtttcccgcgatgctgagcagaggagagtgggggaatgagcctgtcagaaaatctccggatggccctcagttccgtaagagctcacaagctgagatcgattctgacaatgctcggaatcattatcggcgtcggttcagtaattgttgttgtggctgtcggccagggcggagagcaaatgctgaagcaatccatcagcgggccgggcaatacgattgaattgttttacatgcccagtgatgaagaattaacagccaatccgaacgccttacaggaagcgagttttacagaagaagatattaatggattaaaaggagtggacggcgtaaagcaggttgtcgcttccgcggtaaaatccatgacggcgcgttaccatgaagaagacacggatattacgctgaacggcattaacagcggctacatggacgtgaaaaagctggacgttcaagatggacggacatttacggatcatgattttctttcagggaaaagagcaggaatcatctcgaaaaaaatggctgaaaagctgttcgggaaaacgtctccgctcggaaaaatcgtctgggccggcggacagcccgttgaagtaatcggcgtactgaaagaagagagcggctttttatcgttaggactcagtgaaatgtatgtgccgttcaacatgctgaaaacgtctttcggtactaacgactacagcaacgtttccgttcagacggagtcagctgatcaaatcaaatcaacaggaaaagaagcggcccgtctcttaaatgacaatcacggtacaaaagaggcctatcaagtcatgaatatggaagaaatagcggcgggaatcggccaggtcacgaccgttatgacgacgatcatcggttcgatcgccggtatttctctcgttgtcggcgggatcggggtcatgaatattatgctcgtatcagtgacggaacggacaagagaaatcggcatccgcaaatcgctcggtgccacgagaggacagattctgacacaattcttaattgaatctgttgtgcttacattaatcggcggcttaatcggaatctgtctcggctacgggggagcatcactcgtttcccttatcgcaggctggccgtcgctcgtttcctggcaggtggtttgtatcggtgtgctgttcagtatgctgatcggtgtcattttcggcatgctgcccgccaacaaagcatctcgcttagatccgattgaagcgttacggtatgaataatcggcgccccatgcagtctgcatggggttttttgtgttttaatgattgaatgaatataatagacttttttcatttatgataaaaagaaaatgtcatacaattgtccccctttttgtcgaatttacagtttacaaaccctatgtacatacgttaatatgaacaaatgtgaaagattttgatagttattgaatgaatttgagtgattttagttgctagaagtaaaaaaagcgtttacaattatcttgcagccgaaatgaatacgtttccaaaggaggcggaatatgctcactcctgaaaggtatcagctgattatggatcagattgaaaagcgtgatgtggtgaagattcaagagctgataagcatgacaaatgcttctgaatcaacgatcagaagagatttatcaacactcgaagagcgcggatttttaaagcgcgttcacggcggggcgtctaaactttccaacagcaggcaagaacccgatatgcttgaaaaatcctccaaaaaccttcaggataaactgaagatcgcagaagaagcggcatctttattagaagaaggtgactgtatttatcttgatgcgggaacaactacattgcacatgattgattttatagatccatctaaggacattgtggttgtcacaaacggagttatgcatatcgacgctttaataaggaaagggattcccttttatcttctcggaggatatgtgaagcatagaacaggtgcgatgatcggcggcgcctcattaacggcggtcagccagtaccgttttgacaaaagcttcctcggggtgaacggcgtgcacattgaagccggctttacaacacccgatccggatgaggctcttctgaagacaaaggctgtgagccaggcgaaaaatgcgtatgttttagccgatccttctaaattcggagagatttctttcgcagcgttcgccgccttgggcgatgccgctatcattaccactgaagctgaagaacttgcattcgataattaccaagaaaaaactgtcgtaaaggtagtgaaaccatgatttacactgtaaccctcaatccgtctgttgactatatcgttcacgttgaagattttgccgtaggcggtttaaaccgttccagctatgacacgaagtatcccggcggaaaaggcatcaacgtttcgagattactgaaaagacaccatgtgccgtcaaaagcattggggtttgtcggcggatttaccggaaattatatcacgtcatttttgcagcaggaaggtctggaaacggctttttctgaggtagatgaagacacgcgtataaatgtaaaactgaaaacgggcgatgaaacggaaattaacggacagggcccgacgatttcagacgaagtgttcaatgcctttttagaacagttctccgctctggaagagggagacatcgtcgttttagcgggaagcattccttcttccctgccgcataacacgtatgaaaaaattgctgaggcatgcagaaagcagaatgcccgggtagtggtagacatctccggtgaagcgctgatgaaagcgacagaaatgaaaccgtttttgatgaagccgaatcatcatgagcttggggaaatgttcaatacggtcattgattcagccgaagctgccgttccttacggtaaaaaattgattgaacaaggcgctgaacatgcgattgtttcgatggctggcgacggtgcgcttttatttacgaaagaggcggttttcctcgccaatgttcctaaaggaaagcttgtcaattcggtaggcgcgggtgattccgtcgtcgcgggattccttgcgggaatttcaaaacagctgcctttggaagatgcgttccgtttaggagttgcttccggaagcgcgacggcattttctgaagaactcggaactgaagagtttgtacagcagcttcttcctgaagttaaagtcacacgtctatagaggaggaaagaaaagtgaagataactgagctgttaacaagagatacaattcatctcaatatagaaagcaaagagaaagaaaacgttatcgatgaaatggtgacagtgcttgacaaagccggcagattaaatgacagagaggcttacaaagcagccattttaaatcgtgaaagccaaagctcgacgggaatcggcgaaggcattgccattcctcatgcgaagacggcgagcgtcattaacccggccatcgcattcggacgttcaaaagatggtgtggattatgaatcactagacggtcagccggcacacctggtctttatgattgcggcaaccgaaggagcgaataatacgcaccttgaggcattatcaagactttcaacgcttctcatgcgtgaggaaatccgcaaacagcttcttgaagctgaatcagaagatgcgatcattgacatcatcaatcagcatgacaaagatgacgatgaggaagaagaagagcaggaagaacaggcagcgccgtcaggaaaaggcaaaatccttgccgttacggcatgtccgacaggtatcgcccatacgttcatggcagctgacgcactgaaggaaaaagcgaaagagctcggcgttgacattaaagtcgagacaaacggctcaagcggtatcaaacataagctgacggctcaagaaattgaagatgcgcctgcgattatcgtggcggctgataaacaggttgaaatggaacgctttaaaggcaaacatgttcttcaagtgcctgtaacggccggtatcagacgtcctcaggaactgattgaaaaagccgttaaccaagatgcgccgatttacgagggcagcggcggaggatcttccgcttcaaatgaagacggcccgaaacagaaatcaggcacaagcatcggaagtactttctataaacatttaatgagcggtgtcagcaacatgctgccatttgtcgtcggcggcggaattctcgttgcgatttcattcttctggggaattcattcagctgatccgaaagacccgacatacaacacgtttgccgcagcgctgaactttatcggcggcgataatgcgttaaaactgatcgttgcagttcttgccggattcattgcaatgagtattgcggaccgtccgggatttgcgccgggtatggtcggcggatttatggctacgcaggcgaatgccggattcttgggcggactgattgccggattcttagccggttatgtcgtagtccttttgaaaaagctgtttgtctttattcctcagactcttgacggattaaaacctgtattgatttatccgcttctcggtatttttatcacaggagttctgatgcaatttgtcataaacacacctgtcgcagcgttcatgaatttcttaacaaattggcttgaaagccttggaactggaaaccttgttttaatgggtattattttaggcggtatgatggctatcgacatgggcggcccgcttaataaagcggcgttcactttcggaattgcgatgatcgatgccggaaactatgcaccgcatgcggccatcatggcgggcggaatggctccgccgcttggaatcgcactggcgactacattctttaaacacaaattctctaaacgtgaccgtgaagccggtattacgtgctacttcatgggagcagctttcgttacagaaggcgccatcccgtttgcagcggctgatccgcttcgcgtcatccctgcagccgttgtcggttctgcggtagcgggcgggttgacagagtttttccgggtaacgcttcctgcaccgcacggaggaatattcgttgcattcattacgaaccatccgctgctttacttaatgagcatcgtgatcggagcgattgtaacggcggttatcttgggaatcgtcaaaaaaccggttgcagagaaataaacaaaaagcgtcctttacgggcgcttttttcaatcatgtacgcatagaagcgttatgtattttatgatgagttatgataaagtaaagatggtacatgaactgaaacagtgatcgtctaggaggaaccacgttgactgaagaacaaaaacctacttctgaaaaatcggtaaaaagaaaatccaacacatattgggaatggggaaaggccatcattatagcggttgcacttgcgctgttaatccgccatttcctgtttgaaccgtacttagtggaaggatcatcaatgtacccgacattacatgacggtgaaaggctgtttgtcaacaaaagcgtcaattatatcggagaaatcgagcggggagacatcgtcattattaacggcgacacatcgaaagtccattatgtaaagcggctcatcggaaaacctggagaaacggtggaaatgaaaaatgacacgctttatataaacggcaaaaaaatcgcagaaccgtacctcgcgagcaataaaaaagaagcgaaaaaactgggagtcaacctgacgggagatttcggccccgtaaaggttccgaaaggcaaatacttcgtcatgggcgacaatcggctgaactcaatggacagccggaacggactcggtttaattgccgaaaaccggatcgtcggcacctcgaagtttgtgttcttcccgtttcatgatatgcgtcagacaaaataaaaacgccgcgctgcccgatttggacagcaggcgttttttatttggcaaacgaggcggcgatggcgatgaacattaccgtggccagcactgatccgacaatggccagaacgctgaaaaaaagattcacctgctgcttctctttgccgcgtttttcaagcatccgttttgaaaagagatgcgaaaacgtataaatgagggcgattccgacgtacaagccgatgtcacgtgcggtaaagcctgtgacggccagaaaaaccccggtaaagaaaatcataagacaatattctgtgagtgttaaaagcttcaacttgttcctccgtgatgaatatgtatatatatctattgtatcacagggctccgggtttgacgcctgcatcttttcaaacccgtatattcgcagggaaacattttctcttcccctttattcatggtatacttttaatgatgatagacacgatggaggattctaaatgattgctgtaaataatgtgagcttgcgttttgcggatcgcaagttatttgaagatgtcaatattaaatttacgccgggcaactgctacggattaataggcgcaaacggtgccggaaaatcaacatttttgaaaattttatccggtgagctggagccgcagaccggcgatgtccatatgagcccgggcgaacgtcttgccattctgaagcagaaccactttgaatatgaagacttcgaagtgctgaaagtcgtcattatgggacataaacgtttatacgaagtcatgcaggaaaaagacgcgatttatatgaagcctgatttttcagatgaagacggcatccgcgccgctgagcttgaaggagagtttgcggaattaaacggatgggaagctgaaagtgaagccgctattttgttaaagggcctgggcatctctgaagacctgcatacgaagaaaatggcggacttaggcggttcagaaaaggtgaaagtgcttttggcacaggcgctgttcggcaagccggacgttctgctgcttgatgaaccgaccaaccacttggatctgaaagcgattcagtggctggaagagtttttaatcaactttgagaacacagtcatcgtcgtatcccatgaccgtcactttttaaataaagtgtgcacgcacatcgccgatcttgattttaataaaattcaagtgtacgtcggcaactatgatttctggtatgaatcaagccagcttgctttaaagctttctcaggaagccaacaagaaaaaagaagagcagattaaacagcttcaggagttcgtggccagattcagcgccaacgcctctaaatcaaagcaggcgacatcaagaaagaaactccttgataaaatcacgcttgatgatatcaaaccgtcatcacgccgttatccttatgtcaatttcacgccggaacgtgagatcggaaatgacgtgctgcgggttgaaggcttaacaaaaacgattgacggggttaaggtgcttgataacgtcagctttattatgaacagagaagataaaatcgcttttacgggccgcaacgaacttgccgttacgacattgtttaaaatcatttctggggaaatggaagcagacagcggcacatttaaatggggcgtgaccacttctcaggcgtacttccctaaagacaacagcgaatattttgacggcagcgacgcgaaccttgttgactggctccgccagtactcgccgcatgaccaaagcgaaagctttctgcgcggtttcttaggacgcatgctgttctcaggagaagaagtcaacaaaaaatcaaacgttctttccggaggagaaaaagtgcgctgcatgctttcaaaagcgatgctttccggcgcgaatattttaattctggatgaaccgacaaaccacttagatttggaatccattacggcgcttaacaacggcttaatcagctttaaaggcgctatgctgttttcatctcatgaccatcagtttgtacagacaattgccaaccgcatcattgaattaacgcctaaaggcattgttgacaaacaaatgtcttatgacgaatttcttgaaaacgcagatgtgcagaaaaagcttgaagagctatacgcgtaataaagaagcagaggagactctgcttttttatttatgaaaaaagttttcaatcttctgacttcccgttacaataaatgaatacataacttgaaaagagacggaggaatggatcatgaagtttttagttgtcggagctggaggagtgggcggatatatcggcgcgcgtcttgcagaaaagggaaatgacgttacgtttctcgtccgcaagaaacgggcggaacaattacaagaaacgggtttgaccgtcaaaagtgcaaaaggtgatgtttcaattaagccgaaattaatgatggcgggcgaagaaggagcatttgacgcggttatcatcgcttcaaaagcgtattctttgcaggacgtcattcgggatgtcaaaccgtttgtcaaaccttcgtcggtcattattccttttttaaacggatacaggcactataaccagctgtttgaagctttttcaaaacggcaggtgctgggcggcctctgctttattgagagcgcccttaacgacaaaggggacattcttcatacgagcgctgcccaccgctttgttttcggtgaatggaacggggaacgcacggaacgtatgaatgagctggaaaacgcatttgcaggtgtgaaagcggatgtcatcatcagccgggatattgaaatggacatttggaaaaaatatatgtttattgccgcgcaggcgggagtgaccactctgtttcaacagccggtcggaccgattttagaaacagaaggcggccgcaacaccgcaaagcgcctctttgctgaaatcggagccattttcaaggctgccggcatcccgaaagatcctggtctggaagaagagagttatcgcacattgacaagcatgtcttaccatatgaaatcgtcgatgctgagagatatggaaaagggcagggtgacggaaggtgatcatttacacggatttttgcttgagaaagcgaaaggcttgtcagttgatacacctgttttggaaaccgtctgcgccaacttgcaaatgtatgaagcgaaataaaaaggaggcctaagcgcctcctttttttattaaaatgcccagtttccgtttctgaagatcggttctcttttgccgtccgccgtaatgccgtcgatattcatatctttggaaccgaccataaaatctacgtgtgtaatgctttcatttaagccctctttgacaagctcttcccgtgtcatttttttgccgccctcaatattaaaggcatacgcactgccgatcgccaagtggttagaggcgttttcatcgtacagtgtgttgtaaaataaaatatttgattgtgaaatcggtgaatcgtacggcactaaggccacttctccgagatagtgtgagccttcatcggtttcgacgatgccttttaaaatctcctcgcctttttcagctttcacatcgacaatgcgtccgttttcaaaggtaagagtgaagttatcaataatgttgccgccgtagctcaggggtttcgtgctggaaaccgtgccgttcactccgtcacgctgcgggagggtgaaaacctcttctgtcggcatgttggccatgaattcgtgcccgctctcattcacgcttcccgcgcctgcccatacatgttttttcggcagttcaatggttaagtctgttccttcagcctgataatgcagggcgctgtaatgttttttgtttaagtgttccactttttcatgaaggttttgatcatgttttttccatgcttccacagggttttcttcatttacgcgggtcgttttgaaaatttcttcccataaaagctgaacggctgtttcttccggctgatccgggaacacttttttcgcccagcctgttgaagcggctccgatcaccgtccagctgaccttatctgattgaatatattgtctgtatgtatgcaatgcttttccggcggctttttggaacgctgcaatccgtttgccgtcagtgccttttaacaggtcggggtcggatgagacgacagaaataaacgcagccccttttttcgcgagctcttctttgccttttgcttcccattcaggatactcttcaaacgcttcaaaaggtgccatctcgtattttaatttggacagttcatcgtcctgccaatttacggtgacgttttttgcgcctttttcataagaatgtttggcaagcagtctgacaagttcccggacatcagttgaggcattgattacgacatgctgtcctttttggacattgacgccgacttctaccgccagctgagcatatgtatgtaacttttcagtaaacgaactcatcgttcattcctcctcatcggtttttctcatcatatcaaatatcgcctcataaaggaaagaaaggagcacaaacgaaaaagacacagcttttgctgcgtctttacgggtgattcagttttacggcaccgccggccggagaatggggcatattggccagtgaaatgctcatcccccccaaaataattccgcttaaaatgacggctactgctacgcgtcttcccacatctctaaacatatgcttcctccttaatgtttctccagttctcacaatatgagccggctggagaaaaaagaagcacaatcttattatttaatcgctttttgcagcttgtcgatgacgtctaatgaacgtcccgtgccgatagccactgattcaagcggatttgccgccaaatgaacgggaacgacgatttcatctgtcagccattctttcatcccgtttaaaagggagcctccgccggttaacacgacgccgcggtcaacgatatcaccgctgagctccggcggacaatcttcaagtgtcgctctgatcgcttcaagaatatgcaggagcgattcacgcatcgcctgctgaatttcattagactgcagtctgattgtcttcggcagaccggttacaaggtcacgcccgcggatttccatcgtttccggcacatgttcgatcaatgcaaagccgatttccattttcacttgttctgccgtacgttccccgatcagcaggttgtatttttttctgacgaacgaggcgatatcttcatcaagctggtcgccgccgattctgatcgaatggcaggatacgacgcccccgaatgagatgattgcgacttcagtcgtaccgccgccgatatctacgacgacgtttgcgaccggctcgtcaacagggaggtcggccccgattgcagcggctacgggttcttcaatcaagtgaacgtttttcgctccgcagtttttgacagcgtcactgatggcgcggcgttcaacggctgttgagcctgaaggcgtacagacgacgacattcggtttgcggaaggtcattccgattttttttccggcttttttcataatgtgttttaataagtcagttgtcatatcataatcagcaatgacaccgtctttcatcggccgtacggcgacgattttccccggcgtctttccgatcatgcttttggcatccgttccgatggcaagcaccgctttcgttgttgtatctacagcgacaacggaaggctcgtttaaaataattcctttatttttactgtaaacaagtatattagcggttcctaagtcgattccgatctcagttgattgaaacatgttttcacccaatccctatcctgatttaattgattctacatttaaagtttctgagaaaaaacacgatttttgggggtttccgccgggaatgaaatgtttttgtaaaaaaggagggaaagtctgtatcccatatttcaaaaggattttcttctgtaaaaaaacattcagttccggatgctgagaaacttttgctccgttcctttcgtctacgtttatgaaggattttccttggacataaagaagagacattaaaggaagtaggggatttctatgaaatcaattggtgtagtaagaaaagtagacgaactcgggcgtattgtcatgccgattgaattgagaagagcattggatatcgctattaaagatagtattgaatttttcgttgacggagacaaaattgtcttgaaaaaatacaagccgcacggcatttgcttaatgacgggggaaattactcccgaaaatcaggagtacggcaacggcaaaattattttaagtcctgaaggagcgaaaatgctgcttgaggaaatcgaggaagcgttaaaagatagatcataatcagcaaaaagggcggagcatcattccgtccttttattatgaacttgtgcaaaaactcacggggaaagtaagcgaacctgctcaattaattgggaatagttatcattttttagtcaataatgcagtcaacaatgttacaatatatgtagaaatgctagcggcaggtgggactatgggaaaatatcaagcgcgtatcatttccttaatcttggcaatgatttttattatgttttgggattatttattttatatgattgaacggaatccgattaactggcccgttgacatcacctttaccgccgtcacattaatcagcgtctggctgctggcttattatgtggataataaaaagcagctgctggcggagctgaaggacagcgagcagaaagcaaaggcgctttcagatgagaaaaaccggatcatggacaatctgcaggaaatcgtttttcagacggatgcacaagggaatattacatatttgaatcaggcctggacggcgattacgggccactccatcagcgaatgtatgggcacgatgtataatgattattttataaaagaaaaacatatcattgattatattatctcccaaattaagcagcagtccccgtcaggaatgtttacggccaaatatattaaaagagacggctcgatcttttggggagaagtccattataagctgtattatgaccggagacagaaatttgtcggaagcctggggacgatgtctgatatcagtgaacggaaaaaagctgtcgatgagcttctggaaacgaacgaacgcctcgccatgcaatctcaaaagctggccattgccggggagcttgcggcaggaatcgcccatgaagtaagaaatcctttaacgtcagtcagcggctttctccagctgatgaaagcccagtatccggaaagaacggattattttgatattattttttcggagattaaaaggattgatctcgtgctgggggagctgcttctgctcgccaagccgcagaccgtgacgtttaccgctcatcatctcaaccatattttacggcaggtggcgacgcttcttgacacgaacgcggtgctgtcgaacactgtgattgagaaggatttcaggcagactgagtcctgtatggtcaacggtgacgaaaaccagctgaaacaggtatttatcaatattattaaaaatgcgattgaagcgatgcctgacggcgggaatattcatatttatacaaaacgggatgaagaatacgcggtgatcagcatacaggatgaaggaaacggcatgtcgaaagaaaagcttgaaaacatcgggaaaccgtttttctcaacaaaagatcagggaacgggtctcgggcttccgatttgtttacgaattctgaaggagcataatggtaaacttaacattaagagcaaaaatggagaaggcagtacgtttcaggtgattctgccgttagaagcggctgctgtccaaaaggaggaaaaataacttgcttctttttgtatacggtttgttacggaagcgtgaagaaaaccatgaactgctgaaaggcgctccgtgtgtgtgcgagcaggctgcgataaacggcgtgctgtacgaaacggataaaggtcagcctgcggcgtctttagcagaaacagcttttgtgtacggggaattgtatgaaacagatcatcagatgatccgtaagctgaatgcgtattatgctgattttgatcgaaaagaggttgccgtgacgacggatgccgggaataaaaccgccttcgcatatgtcgtaaagcccgaccagtgtgcctcattcagccgtatcaaaagcggagactggaaagaataccgttttatgaaacgggaggatgacagtccggtttattatttcgcatacggctcctgtatggacaatgcccggtttaaacaggcgggggtcgaccacttttttgccgagccggtcggaggggcggttgttgaagggtattcgacgagattcacgttaaggcgtcctgacggttccagagccgatcttgttgaagacgggggacgaactgaaggcgtgctgtacaagctcccgtttgaagcggcaacctatctgtacaaaagagaaggtgttgataaccacacataccgtcccgcgttcatagaagtgtgtgccggcggccgtgtatacagaggcgtcctgacgtttctcgttcttgataaagctgaggaaattgcgcctccgggtcactatcaggaagaaatcgaacgcggattggatctgtatttatcgcccgccttttcagaaaagcttaaacgctatatgaactcattgccgaaaatgtgatactattcctattagagatattgtttaaaggagtactgttatgagaaaagagtttgccgttatcggtctcggacgcttcggcggaagtatttgcaaagcattaagtgaagaaggccttgaggtcatggcgatggatattgatgaagataaagtaaatgaatacgccaaaatcgcatcacacgcggtcattggcgattcaaccgatgaatcggtgctgaaaaacttagggctgcgcaactttgaccacgtcattgtggcaatcggcgaaaatatacaggcgagcattttaacgacgctgatcttaaaggaactcggcgtgaacacgatcacggttaaagcgcagaacgattatcatgagaaagtgcttgcgaaaatcggggccgatcacatcgtccaccctgaacgtgacatggcaaaacgcatcgcccacaacatcgtatcaaataatgtgcttgattatttggagctgtccgacgaacacagcattgtggagatcgtggccaacagcaggcttgcgggcaacacactgcttgatctggacatccgggcgaagtacggcattaatatcgtggccatcaagagagaaaaagaagtgatcgtatctccgctggcgactgaaatgatccaaaaagaagatattctcatcgttatcggctctcttacggacatttcccgatttgaaaaaagagtgcttcatacaaagtgaaaagccgtccgtaaaaggacggtcttttattatgtcagaatagaaagacatttatcatgtaagcggtatattctgcaatttttattgactatgatcaggcgatccgatagcatattgtaccatataaagaaaaagaggaggcctcattttgaacaaagaaacactggctgaacggctgaatgcatcagccggcagacaaaaagccgataccgtcattaaaaacggaaaaatcatggatgtatttaaccaggaatggatttctgcagatatcgccattacgggcggagtgatcgtcgggctgggcgaatatgaaggggaagaagtcattgatgcagaaggtcaaatgatcgttccggggtttattgacggacatgttcatatcgagtcctctatggttactccgattgaatttgctaaagccgtcctcccacacggagtgactactgtcattactgatcctcacgaaattgcgaacgtttccggagcaaaaggcatttcttttatgatagagcaggcgaaaaaggcgccgctgaacatccgtttcatgcttccttcctgtgttcccgccgctagctttgaacgctcaggagccgtattaaaagccgaggatttaaagcctttttatcaggagaaagaggtgctcggacttgcggaagtaatggattatgtgtctgttgcggaaggtgaagaggatatgcttcagaaactgcttgatgccaagcgtcacggaaaacggatcgacgggcatttagccggactgtcttcagatatcatcaatatatacagaaccgcaatggtgtcaaatgatcatgaagtgacgacaaaagaagaagcgctggacagaatcagacggggaatgtatgtcatgctgcgcgaaggatcggtggcaaaaaatacgctcaatgtgctgccggcggtgaatgaaaaaaacgcgcggcgctttttcttttgtacggatgataagcatgtagatgatctgctttcagaaggaagtgtgaaccaccaagtcaaaatggcgataaaggcgggacttgatccattccttgcgtatcagctcgccagtttaaatgcggctgagtgctacggtcttgaaacaaaaggggcggtagcgccgggttttgacgcagatctgctgtttatttcagatgtacgggaggctgtcgtcacgaagaccatggtcgccggccggaccgttgccgagaacggacgcacggtttatgaacagtctgccggttcctatacgccggaccaggcgctgttggatacagtgcggctgaaagcgccgctgactgaatcggatcttcatataccgattcaagagggcaagaaaatgaatgtaatcgaaatgataccgaatcatttggagacgagaaaaaaagaagtgcctgcaccgtctgctgacgcgttttgtcctgatacagaaaatgatttattaaaaatcgccgtcacagagcggcacagcggcgaaaaaatgataggactcgggattgtacaagggttcgggttaaaagaaggcgccatcgccacaactatttctcacgattcccataatatcatcgccgtcggtacaaacgatgccgatttggcaaaagcaatcaacaggctccgtgacaccggaggaggattaacagccgtgaaaaacggagaattgcttcactccgttccgcttccgatcgccgggcttttgtctgataagtcggcggaatgggtcaatgacagcttgggcgtgcttcatgaaaagcttcctctgctcggattcaccggtgatttcaatccgtttctcacattatcgtttttagcgcttccggtgattccagatattaaaatgacagcagccggtctgtttgatgtcaaagcctttcagcatattccgctgcaataaaaaaactgcactcattacgagtgcagttttttttagacctccataatgatcggaaggatcatcgggcggcgttttgttttttcgtataggaacggagcaagtgtatcggtaatttcgtttttaatttcggaccactgcgttgttttccgatccattactttctccagatggttcgaaatcagctgctgcgcgtcattgatcaaatcaccggattctctcatgtatacaaaacctcttgagattaaatcaggccccgccgaaaccttaaagtcgtccatattgatgctgacaacaacgataacaaggccttcttctgaaagaatgcggcggtcgcggagcacgatattgccgatatcaccgattccgcttccgtcaatgtaaacagagccggacggaattttgcctgccacagcggcttcttcgcctttgagggccagcacttcgccattatccatgataaagcagttttcttcgggtatgccgcaatcagtcgcgagtttgacgtgcattttctgcattctgtactcaccgtgaatcggcataaagaacttcggtttgatcaggcggagcattaatttctgctcttcctgtccgccgtgtccggatgtatgaatgtcattcaatgaaccgtgaatgacttctgcgcccgcacggtacagctggttgatggtgcggcttacgctgattgtgtttccgggaatcggagaggaagaaaagacgaccgtatctccgggattaatggaaatctgccggtgcgtcccgttagcgatacgcgataacgccgccatcggttcaccttggcttcccgtacataaaatcgttaccttattggcaggcatacgattgatttcgttatgctcaataaacgtatttttaggacaggtaatgtaaccgagattttgtccgatttcaatagccgattccatactgcgtccgaatacggcaacttttctgccgtttaaaacggctgcttcaatcacctgctgaagacggtgtatattcgaagcgaatgtcgcaaatataattctgccgtccacttttcggaaaatatcgtgaatgctttcgcctacgcggcgttctgacatggtgaaatcaggaacctcactgtttgtactgtcagaaagcaggcacaaaacgccttctttcccgatttcagccatctttgtcaagtttgccggttcgcctaccggtgtgaaatcgaacttaaagtccccggtatgtacgatattgcccggcggtgttttgacgacgattccgtatgaatccggaatgctgtgtgtcgttctgaagaaggatacagacgtcttgcggaacttcacgatgtcgtcttcaccgatgatgtttaatttggtctgtcttaacagcccgtgctcttcaagtttattccgaagtaagccgatcgcgagtttaccgccgtaaacgggaatatttacttgtctgagcaggtacggaataccgccgatatggtcttcgtgaccgtgggtgataaacagacctttaattttatcttcattttttactaaatacgtgtaatcggggattacgtaatcaatgccgagaagttcatcttccgggaacttgattcccgcatcaatcagtacaatttcatcctgaaactgcaccccgtacgtatttttcccgatctcgcccaatccgccgagggcgaaaacggcagtctggtcattttttacaaatttcattccgctcataactccaatactttaaaattttcgctctgcttctcatattctaaaaaagcaccgtccacaggctgaacaaattcaatgttgtatttctgatctttcagtttcgttctgacgtcccgttctgaaacgccctcaatgtaaagtgaatctgttttttcccgaacaggtacttcgtcagccttctcttgataaaataccttataaatcatccaaatctctccttaaatgccgtatgttagactcgcttattctattatattcgaaaacggattataaggaaagtctcgagcaaaaaagggactttcaaaaaccgaaagatcccttctacgcgatgacttttttccggagcattccgccccactgtcttctgagtttcttccgtaatcggcgcagcatcgtatacctcctttaaagccctttatagcagtagtatgcggaaaaaatgaatttgttttcgtgggtaaaactggaatttcatcaaggcggttttccggaagaaaaactttctgtatgatgatattgaaaaagacacgactgataaacgggaaaaaggagaaattgacatgaaaccaaaattgatcttttttgatattgacggcacgatctatgaccatgataaacatattcccgatagcgcaagaaacgccgtgacggcgcttaaagaggctggccatcacgtttttatcgccagcggaaggtccccgtttatggtaaaaccgattctggaagagcttgagattgaatcatttatttcatacaacggccagtatgtcgtatttgaaggtgaggtcatttataaaaatccgcttcctgaagatgcggttgtgcgtttattaaagcaggcggcagaaggggagcaccccgtcgtatttatggcggaagacacgatgaaaacgaccgtccccggacatccgcacgtctcggaaggaatcggcagtctgaaagcgccttatcccgaagttgatgaaactttttataaaggaaaagaaatttatcagctgcttttattctgccgcggacatgaagaaaaagcatatgccgcttttccggagtttgattatgtccgctggcatgaattgtcaacggatgtgcttccgaaaggcggttcaaaagcggaaggcattaaaagagtgcttgagcggcttccgtacggcgtaagtgacacttatgcattcggcgacggactaaatgatcttgagatgatccgttttgtcggcaccggggtggcgatgggaaatgcggttccggaattaaaagctgccgctgatttcgtcacaaagccggtggatgaggaaggaatcagctgggccgtcaaagaactgggccttttgaaataaagaaaaccggcactttgggaagtgccggttatttttaacggtcaatggcaatggcgttttcaggttctttgaacggattttctttatcaatatggtcgtaaaacatcacgccgttcagatgatcgatttcgtgctgaaacacgatggccggaaaacctttgaggcggatgtcaatctgttctccttcaagcgtcaccgcctttacgcggatgcgggcgtagcgcggcacatagccgggaatgggttcgtctaccgacaggcagccttctccgctcgtcaagtagcttttttccactgagtggctgacgatcttagggttaaaaagagcatagctgtataaagtgcctttcgcatcttctgcatggacggcgatcatccgtttttttacgtctgtttggggagcggcaagaccgacgcccggacgaagcttgtatttctcggctaattcaggattttggctgtttttcacaaactcaatcatatcagcaagatgctgtttttcttcgtcagaagcgggaagctgaacctcttcagcgatctctctgagcgcgggatgtccgtctcgtacaatattttccatagtaatcaagaaacttcactcctaaagcttaatatgtaaattatagcgaatttctttatcgcggcgcaatgaaacaattggccggccatagcaggccggccgatgtcatggtgtataatgtcagcagccgcagcctaaataagcggcaccgacgatgattaataagataaacaatacgacgattaatgcgaatgtgcggccgtatccgccgccgcagccgtaaccgtaaccgccgccataaccatatccgccgccgcaacaaccgccgccaaatccgccgccaaatccatatccgtacataaaaaaacctcctcttttaattacgctgaccctctgtcagcagggccggcgtctactataaactatgtaaaagccaaaaagatgtatggtcatccgccctgttttctcaattttttacgcaagtattctttgaaagcaccgtaagcgtctttacacggtcatgccaattacagctcagctattgtcaaaaagcgttcgggcttctatagtggaaattgtcaagattgggggattttaagtgaatatgattcaaaaaaaggtattagcaggaatcggagcgctcggcgccgcaagtatgcttcttgccggctgcgggggaaaagatccggttgaatcgcttcatgactcgatggaaaaagccgttcaagcggaaaaaccgtttcaaaaagagcagaaaacattagaaaaattggagaaaaaagagcataagctatacgacagcgcggttaaactgaatatggatgattaccagaaaattgtcacactgtctgatcaggctctgagcaatgcaaatcagcgaaaaaaacatctgaaagcagaaaaagacagtattgatgattcaaaaaaagcgtttgaatccgcaaaaaaaacttctcaagaaataaaggataagaaagtaaaagaaaaagccgggcatgctgtcgctttaatggagaaaaggtatgcatcttatgatcttttgtacaaaaagtacgaaaaagccatttcacttgataaggacctttataaactgattaaagataaaaagctcacattagcgcagctggaagagcaaatcagcaaagtaaactcagtttacgaaaaggtgcataaacaagcagatgagttcaatcaatttactaaagactacaacaaagagaaagaactattattccgcaaatagtatagtgaaggcatatcggcatgggctgatgaactgataacaaccgagttcagccgcctgtaaaaaggcggctgaagaattggtatatacttgtgtttcccattgacaacaagtaaatcatggtatagtatttatttagggaaatattcacataaaaccaatcgttgtttcggcacgttggaatgtttttattatattgatatatataaaacagaatgaaaatgcgattttaattatcagaaaattctatctatttatatttacggcgatatgatatttgtacatgctttttgcttttaaacctttatccggcataaaggtttttttattttgcttcgtaatgcttattaagtaaggatgctgagagtaaacgacaattttaaaattgaagtgaaaaacgttaatcaaaatcggaacgaaaagaaacggcagaaatacggaacaggaggaaaacaaatgcttgcttacgtctttcccggacagggagcgcagtttaaaggaatgggcagagacttattcgatgaattcagtgagctcattaaaaaggcagatcatattttaggatactccataaaggatttatgcctttcagatgaaaaagaaaggctgactgatacgaagtatacacagcctgcaatttatacagtgagcgcactgcaatatttaaagggtttaaaagaaggtcatacacgccctgatgctgttgcaggacatagtctgggtgaatatactgcgctttttgcggccggcgtttttaattttgaaacaggtctccggctggttgctaaaagaggcgagttaatgagtgaggcttccgagggcggaatggctgccgtgatcggactggatgagcatcacataaaaaaaatacttcaaaagtatgaactcggccaaatagatatcgccaattacaatacatcttcacaaattgtgatagcaggggcttcagaagagataaaacgggcagcctctttttttgaaaaagaaggggcgaaagcttatatcgtattgcaagtcggcggagcttttcattctcgtttcatggaaagtgcacagcgtgaatttgcggaatttatcgaggagtttcatttttctgaattgaatttcccggtcatttctaactatacggcaagaccttataaacaagaagatatcaaacggaatttaattgaacaaataacaaactcggtaaaatggactgaaagcatcaggtatctaatgggacaaggcgtcactctgtttgaagagatcggtcctggaaacattctgactaaattaattcaaaccatacaaagagatgaagaaccgcttactatcagtgcgccggaagacagtctctttttttctgaagggaacacggacaattcggaaagcgggaaagagcatagcctcttggccgaaaatatagagagcggtgcagcttcaccggtgtcccgattgggtgatcaatctttcaaagaagattacggtttgacatacgcgtatttggcaggtgcgatgcatagagggatctcttccgctgaaatgctgatccgcctcgggaagaaaggaatgctggggttctttggcacagcgggtttatctataagggaaattgaacaggcccttatttctattaagaagacactcaaaaatggccagccctacggaatgaatctgcgatttgagccggatcatcaagatagagaaaaggaattgatagatttatatatcaagcatgacgtacgagtaatagaagcgtcttcgtatttttccgtcagcgcaccattaatttattacaaagcgcatcagttgaagatagacaaaagcggcagggtcatacctcataatcggatcattgccaaagtttcacggccggaagttgcggccgcatttctgagtccgcctcctccaagtatcgtaaagagaatgtgtcagcacggtatgctgacggaagagcaggcggagtggctcagccgtattccggcagcagacgatatcattattgaagcagattgcggaagtaatactgaacagggctcattgacagcgatgctgccgttttttgttaacctgcgggatgaaatgatggaaacacacaaatacgcaaggaagataaggatcggggctgcgggaggaatcgggactcccgagtctgccgcgtctgcttttttaatgggcgctgattttattatgacgggatccattaatcaatgtacagttgaagccgaaacaagcggttttgttaaagaaatgctgagtgagacaggaatatgcgatactgcttatgcgccttcggagactctgtttgagttcggaacaaaggtgcaggtgctgaaaaagggcacgctgtttccggtcagggcaaataaattatttcaaatctacctacaatatgagtctttgagtgagatagatgaaaagacaaagattcagctcgaaaacgattattttaacaagactgttgatgaaatctacgaaagcttaatagaaaaacagccgaacctggcccaaaaagctgagcgcaatcaaaaatataagatgctgttactatttaagtggtatttgcagagaggatgtctgcttgctttggaagggcaggaagaacaaaaggtgaatttccaagttcattgcggcccgtctttaggcgcttttaatcattgggtaaagggcacggatttggaatcatggagaaacagacatgtcgatgacattggtgaaaaattgatgaatgagaccgaaagtctgctaaggcgcagattggatacgttatttctacactaaagaaggggcgggtggaggccaatggttcatttgaataaacagagtgcggatatcgcgataatcggggttgcttgcagattccccgatgcagatcattatcatgaattctgggaaaacataaatagcggcaaagattccatccgggaagtgccgattgaacggtgggatcccgatctttattattcagctgatatcagtataccgaacaaaacaatcagcaagtggggaggttttattcataaagctgaccatttcgaccataagttttttaatatctccccccgggaagcgaaaaacatggaccctgagcaaagaatccttttagaagaaacttggcggtgcatcgaagattccggggtttctttgcaggatctccagcgtaaaaccacttctgtttttgcgggtattatgaattctgactaccggcagacaggtcatgctgaatcggaaatcgacagttatgcctgtttaggaagtttcgaagctatgctttccaaccggctttcatacacattcggtttgaccggaaaaagcatgtctgtaaatgccgcttgtgcatcgtcgcttgttgctttacatgaagcggttaagtcattgcggacaaaagaaagcgattatgcaatcgcatcgggagtaaacttgaatttccaacccggaaaatatatttctttttctaaagccagaatgctgagtcctgacggcaaatgtaaaacctttgacgcagcagcgaacgggtacgttcccggagaaggggcaggcgttgtattgctgcagcgccttggtgatgcagtaaaagccggtcaccatatatacgggatcataaaagggacagctgttaatcatggcggtaaaacccgttccataaccgctcccagagcagaagcgcagtgccgggtcatctcagaagctttacacaatgctgctgtcgatgctgcgacggtttcttatgtagaagcacatggcacaggtacatctctgggcgatccgatagaaatagaagcattgacaaaagcgtatcggcaatatactgaggatactcaatattgcaggatcggaagtgtgaaaacaaatatcggtcatacagaagcagcagcgggaatggccggattgataaaagttctaatgatgatgaaacaccggagggtgccgaaaagcctgaatgtacatacggtaaatccaattatacagtttgaaaaaacaccgtttaggccggcgcttgattcaagtgattggaaggcggcagacggggctccgctcagggcgggaatcagctccttcggttttgggggtgttaactctcacgtcatcatcgaagaatttatacatacaaaagacgaatctgatagaaaaggaaggatacccttccttttttccgctaaaagtgaagaaagcatgaaacaaatgatacatcattggagaacctttgctgacgattcagaggaattttgcaaaatatcaaatgaagtgatcagcagcacccttttaacaaggacatcgtttgattacagggctggtttattggcaggcagcaaggaggaatttaaaaatcagcttaaagagggattaagttttcggaggaaacaaggttctgaatgggcgcttgccatcggtgacttcaaatgggaaagttataaacaatttgccgttttgaaacgggtgttccctgatttagaaaagaacgtaaggccggtgctgaagggtataccaacattacacagttcatttaaaagaaaatggacgcctgagaaaatccgcttgtattctttagttatcaatacggaaatcataaaaagtatcctggcatccggttttaagccaagcctcattacaggcgccggagacggatattacgtcgctcttgcagcagcggatatcatcaaaattgaaaaggccatttctgtcatcacaagcgctgaaaaaccttcgcatttatcctgtgagtcgccgtccatgccatttgtcaatccgtacacttcaaaaacgtacccgccggttcgattaaatgaagaatatgtaagggtgctgctgaacggtctgagcttcccggctgattttgcagaccgcctgtacgggaaaacacggctgcttcttgagcaccaatatacgtttaaagggtttttagaagagtgggataaagcggggaagactcaggaaatcgagattttatcttatattgtgaagcgcacggcggataaaagaaacgcattgccggctgatgaggaagcggcgatcatggctatccttgcctctatgagaagactgtataagagatgggatttaacagattatgatggattctttaataatgattatgttctggaaatattaaatttactggatgaaggaatcttgtctaaagaactttttctgagcatgttattgaaaaagcaagacggaattaaacaggctgttgcttgtattaatgagcagccggcaggtttttatgataaaactcgttttccgttgatgacagaatacaatcaaatggatgccgtgtctcaggagatagctgaccatatgccgcttcacacggaagaaaagggaacggagccggatgtgaatatttctgatttttcagtttttcaattcggatcgctccctccatcagcaaaactaaacaaagcggctgcttttgaagcggacaaaccagccgatgaggctctatatcattcatttatgcaaatgtggctttcaggagaagagattgaatgggcgaaactaggtgatgatcataaaagaaaagccccgcttccgccttatccgtttgagcgctctcaattttctttaaaccctcagccggtaaaatcagacacggctttttcagaaaagaagaatcaggcactttatacgccggtatggaaagaaaccgcaattgagaatgaagcgggcagccgacaagcctgtactattttgttgttctccgggaataaagactattttgaagagctgaaaaaaagagagaatacgtccgcatatcttattatgcccggtgagcgtttagagcagataagcgacagtgttttcacgatcaacaggcagcgtcccgaagattatcaaggtgtcattcgtctgttaaaggaaaaaggcgcagcgcccgatgcaattttgcatacgtggtctgaaaaacagcctgaactggaagaaacactcgaatcaggaatttattccgtgttttatctgactaaggctttaatcagcgagaaccttataaataaagtaacgttcatttatacattcagcgcgaatcaaaaagaaaaattgccgtattttgaaggtgtgaacggttttttaaaatcggtaaaacaagaatacccgcagcttcattgtaagacggtttgctttgaacatgattctgcatccgtttcattttcagagaaggctgacattctttataaagaaataaacacagcgcctgatcggcatctttatatcaagtacagaggctgcgtaagatatgcacggatgttagtgaagcagagagaaacaaacagaaagaccattcaataccctgaaaaagataaagtgtatttaattacagggggattcggggggattggcagtaaagtcgctgaatattgcgcgaaaactgaaagatccaccattattctatcggggcgatctgctttaaacggagatatgcagaaacatttagaatacctgaacagctttaaagcaaaggtttattatatacaggcgaatatatccgataaagaagcggtaaaaaaaatgattgacggtattaccgatcagcatgcaggtcttcatggcgtcattcattgtgcaggagttatcagagactcgctgctttttcgaaaaacaaagcatgaactttcagaggtgattgctccgaaagttcatggtgcattgaatcttgatcatgcaacgaagtcgctggaattggattttttcgccgttttttcttcagtcgtctctattgcagggaacgaaggccaatgtgattatgcatatgcaaacggctttttagatcattttgccgaatatcgggaacagaaacggcaaaattctctgcgcagcggccgcacgctgacaatcaattggcctttatggcaagacatcggaatgggggcgaacctgtcaggtcaagggcggacgtctctttttcatggttccgggctcgaagaacttcctgctgaagacggaacgcaatggttttcgcggattgtaacttcgggtcagctgcataatattgcagtctgcggtgatcatgagcgctttgaacaatttatgcggcagagatttttgacggatgaaacagagacaggcagtgccattcctttggctcaaggcgatattttggatcagacagttttgtttttaaccaatatcatctcctctgagatcggtgcagaacgggaagagatcgatcaagatgtgcatctggctgaatatggaatggattcggttatgattcatcaatgcaacacaaagctggagcagtcactgggagcaatttcgaaaacgcttttatttgaatttcatacaatcagagatttagcagatcatcttgtaaaggaatatccggatcggctggggcgtttattttcacgggaggaaaaaggaaaacagattcagagcattacccccgccaggccggaacaaaacatcactgcacctgcggcggaggaaaaagaacatcttgacgggatagcggtaatcggtatcagcggccgttatcccggggctgaaaatatcgaagaattgtgggagcttctatcaaaagagagaaccgcaatcacagaaattccgaaagaacgatggaattatgagacctactatgatccagaccccgctaaagcgcatgaggggaaaatttattgcaaatggggcggatttttaaagaatgctgaatcatttgattctttgtttttccaaatatcgccgagagaagcagaagcgatggatcctcaggaacgaatatttctcgaaaccgtatggaaagcatttgaagattcgggatataccattgaagggttgagaaagcagaccgaaaaacatgtcggtgtatttgcgggagtgacgaccaattcttacaagctgctcggcgaaagaataccgacggacaaaaacgatgtacttccaaattcgttcccatggtctctcgcgaacagagtgtcttacacatttgactttacaggtcccagtgtccctgtagatacggcttgttcttcatccttaacggcaattcacatggcttgccaaagtttaacaaagggtgagtgctcggttgcggttgcgggaggagtaaatttgtatcttcatccttctgactatttataccgatgtcagatggggatgctttcaaaatcgggaaaatgcagaagttttggagaaggcggcgacggtttcgtgcccggggaaggtgtcggggccgttattcttaaaccgcttaaagatgccatacgtaataatgatactgtgtacgccgtcattaaaggaacggcaattaatcatggcggaaagacaaatggctatacggtgcctaatcctgccgcacaggcggatttaattcaaggagctcttaaagcggccggttggagcgccagaagtgtcagctttattgaagcccacggcacgggaacgccgctgggtgacccgattgaagtccgaggcctgaccaaggcgtttagagcttataccgaagatgtttcatattgctctctcggatcgattaaatctaacatcggccacctggaagcggccgcgggtattgccggcctgacaaagattatcttacaaatgaagtataaaaaaatagccgcaacactgcatgctgaacgggtgcatccggatctttatctggaagagacacctttttgtcttcaacaggaaaccgccgactggataaaacccgcgaatgaaaaacattctgacagcaaatatccgcggcgtgcgggattaagttctttcggagcgggcggggcaaatgctcatatccttgtggaagagtatgagtctgctgctgactgtcatacgaggcgtgaggaaagtgaggaacttatcgtactctcagccaagcattcactgagtttacgggaatcagcaaaacagctggaggaatatcttcaaaaggcccgtcataagcagggcgagtttttacagcaagcgggaacaaacaagccgcttcacctttctgatattgcgtatacccttcttgaagggcgtgaagccatgccggaaaggcttgctgtcatttcaaataatatcgatgatctgatgttgaaattaaatcacttttataatggaattgacgatcacgaaatatttagagggaaaaaactgaatcataaacgcggacagcggcaatcggatcttccgctcaaatccggcagcaccacattagccgaaatggctgaattctgggtatcaggaggcaatttaagctgggatgacttccgcaccggcagaaaaccggcaaaaattgccctgccgacttaccctttcttaaaaaacagactgtgggtgtcaaataaggcgcaaacaacatcagcagccggtacagctcctttatttgatttttcagctggtgagtgccgattttataaaacgctttcagattctgaatattatgtaaaagaccatgttgtgcatgggaatatggttctgcccggagcggcaatcatcgaagcggccagagaagcgggagagaggctgtacggaaaatcagtcataaaactgagtcaggttgtatgggcggttccgataaccgttgaaaaagaaaagacgataatgatagatctgctgccgaatcaaaaagacggaagatttgtggtgaaaaccgatatgcaacctgaagcggcagttcactgccaaggaaacattatcacatgcggagatcaagatgcctctcatacagagcattttcaattggacagctggttaaccggacagaaaagattaatcagcggcgctgagtgttataggaccttccggcagagcggtttggactatggaaccagttttcaggtaataaaacagctgtttattcatgaaaatgctgttcttgcacgaatatcacttcctgagagcattcataaaaaatccggcacgctgctggaaccgtgtttattggatggcatttttcaatccacaacagggtttacgtccggtcaggaagacgatcacaccgcatatttgccttttgaattaggtgagctggagattcttcacgcgccttcggcaaacggctatgcttacattacagctgccgatgaaagacaacatgatgatgtcaaaaggtttcatatactatttatggatgaaaacggatctgtaagtcttaaaataaaaaacttagcgttgaaggcattaagggctgcaccgcagactcaggatgagcggcattcagttaagtattacacagatatgtggaagcgggcccctctgcttcatcagcctgaagccagcggtttaaacagctgccttgtgatttcactccgtcgggatatatcagaaccgctgatccgccaggcatataaagatatcggcctgaacatgatctttgtccgccatggcggcagttttcaagaaaaacaagctgattcctttgaattgaacagcgtcaaacttgacggctataagaaattgctggcgattcttaaagaaagacaagtgacaattgaccgcgtcattttaatcgggatgagccctgaaacgggaattgagcataacattgatgaaaagctggaagaggctgttttgccggttttcaatgtaacgaaagctctgttagcaacaatcccaagacataaaattctgatatcacatgtatttttcacaaggaacaatcaaatcttaccttatcaaatggcaatcagcggcttttttaggtcgcttcatttggaacatccaatgttgtccggtaaaaatattgaaatacacagcgacgatattcagttacagctgaacaccggtctgcctgaattaaaaaaccttgtgaaagaaacagtcatcagcgatgatacttcagagatcagatacagagatggaatcaggcaggtaaaacactctgcagaaattgaaagtgcagagccccccaaaaagatggaagtaaaagaagggggagtttacctcattacaggaggaacaggcggtctgggactgatttttgccagacaccttgtgcgaaaagggagaataaagcttgtccttatcggcagatcagagctttctgtggaagccgtaagcaatgtaaaagagctcgaaaaaaacggatcagaggttttttatgtaagaaccgatatttctgataaggaaaatgtcaacaacctgataaaactcgtcaaaaacaaattaggtcctgttaaaggaattattcacagtgccggtgtgataaaagattcattactcatcaataagcgtgaagaggatctcgattcagtcttggcgagcaaggtttacggaacgatatggcttgaccggtatacagacagagaacctctggacttttttgttatgttttcatctatcagcgcaataatcgggaatgccggacaaactgattatgcttatgcaaaccggtttatggattattttgcggaaatgagagcggcggaaaataaacctggaaaaacagtctcgattaattggcctttatggaaagaaggcggtatgcaaattgatattcattcagagaagttcctttatgaccgtttcggaatgctgcctctgggaaaacgggaaggccttgcagcatttgatcaagcaatgacagggtgtgaacatcaaataatggtatttagcggtaatgaattaaagctggaacgaatgataacgattgacagcggaaaaagtgatccggcaatcgccgacgaaaatcacgaaccgaaagagctgtcaataactgaatctttaaaaagcactttgacgcgcatcatcaccggcgtattaaaaattgaagaacgggaatttgattttgaactgccgataagtgaatacggatttgattcaattatgtttacaatgctgggcaacgaattaaacgaaacattaggaatatcaatgatgccgtcagattttttcggtcttactgattttaatgaacttcttgagtttttaaagagtgagtattccgaggagcttcatctctgcggttctttttcttcagatgaatctgcggcgaaagaccggagagaaaatctgattgagggcatcgcaaagatgatgtcaagtattttgaagattgacaaaaaggaaatagaagaagagacttcattcggcgagtacggatttgattctattacgtttaccagactcggaaatgaaatcaatcaacaatatggtacggaattattgccgtccattttctttgaatgcaattcactggctgaaatgactgattatgtaatcgagcaatacggagaaatcctttttgctgagacagaatctttttctgcagctgacgaaaaaacattgtacagcacgcctccgccggaatcttatgaacattcccctgagcctgaaaacaaagccaggcaagaggaaagacatatgaatgagccggttgcaatagtgggaataagcggccgtttcccccaaacagatacgctggaagacttttgggaaggaattgaaaaagggcgggatatgattacagacattcctgaagaccgttggaactggaaagagtttgacggcgatccgatcagggacgtcaatagaacaaaaataaaaaaaggcggatttatcaaaggcgcggacagttttgatccgttgtttttcgggatttctcccgccgaagcagaattaatggatccccagcaaagaatttttatggagactgtatggaaaacaatagaagatgcgggctataagccgtctgatttggcagggacgaaaaccgcggtgtttgcaggggtcgccacaacggattatgctgaacgtctgaatgaaaatggtgtctctgttcaggcgcagaccgcaaccggtttaaatcattgtatattggcaaatcgtatttcttaccagctgaacctgacgggtccgagcgaaccgattgacactgcctgttcaagttcgttagttgcactccatcgtgcggctgaggggattcaaagaggcgattttgaaatggcgattgcaggcggagtgcatattatgacaagccctactctgtttatagcttttgataaagcaggtatgctttccaaagacggaaagtgcaaaacgttcgataaaagcgctgacggctatgtaaggagtgaaggggcggctgcagtattgcttaagccgctcagcaaagcacaggcagacggtgatcatatatatggtttgattaaagggtcagctgtaaatcacggcggccgcgccaattctttgacagctccgaatccgaacgcacaggcggacttattaaccgaagcctggcggaaggcgggggtcagccctgccactgcgggatatatagaagcgcatggcacagggacaagtcttggcgatccgattgaagtaaacagcatcataaaggcatttaaaacgttatatcaagaatgggacattccttttgcgaaacagaaatgctgcggaatcgggtctgtgaaaacaaacatcggccatctcgaaaccgctgccggaatagccggagtgatgaaagtgttactggcttttaaatatcgcaaacttccgggactcgcccatttttcagaactcaatccatacatcaaactggaaaatacgccattttatatcacagaaaccgctcaaaagtggaatccgataaaagataaagagaacaacgatctgccgaggagagcgggtgtcagctcattcggattcggcggtgtgaacgcgcatattgttttagaggaatatagggaacctcaaaaagaaatgccggaaaacaacggtaacacacatatttttgttttatctgcgaaaaccaaagatcaattacttgagtatatccggcttatgcttcagtacttggatcgcgtgattgccggtgacatgaccgttaatgccagtgacatggaatttacattgcaaaacggccgggaagcaatgaacgaaagaattgccgtatgtgcagcgagtctgactgagctgagagataaatacgtcagctttcttgatgacagcaaggtgcaaaaaggcgtatttataagcgaaaacactgaagagcccacagctgtttctgaatatatgattgaggaggctcttcaaagcggaaaagaggagctgctcgcacaatggtgggccaatggagccgagtttgaatggaagacaatcggcaataagaaattgaatagagtgccgctgccaacttatccgtttgcaaaagagagttattggttcaccccgaaaaagaacaaaagcgaggttaatagtaaaagtcttcacccattaatcagcgagaatgtctcaacattaaagaaacaagcatttaaaactgttatttccggaactgaatttttcgtcactgatcatcttgtttcaggagactatgtgctgccaggagccgcttcgcttgaaatggctcttgtttgtgcggaaataagcggagaaagtaaagtatataaaataaaagacgtgatgtggaacagacctatattatataaaggaaaaacgctgcacatttataccgacttggaaatgaaacaagataagttgaacgtaacgatatgtaaagagggtccggatggcgtgcagcaaatctgcacacaaagtgaaacagtattcggggacataaacagcaatgctgagtatgtcgatattgataagttcaaacgcagcagtaaggctgtcataagccgggaagagtgttatcaccgcttcagtcgtatgggcctgacatatcatagcagttttcaaacgttgaaagccgtatatcgcggtgatatggagttaatggcagaattggagcttccggctcatttagcgaacggaatttcacattttacacttcatccttcattaattgacggcggttttcaagcggcggcatttttgttaagagataatgagaaagacggcttatttgttccatattcacttagagagcttcacattaagagggcgcttactgcccgatgccatgtctcggtgagagaaaccggtttttatacgtataacattgattttattaacgagagcggcgaaatagccgtgagcatgaaagacttttctgtcagaaaagtgaccgggggagaattaaccgcaggacgtaaaaatgaagatcaggaaattctcttcttattagaacaattgaaaaacggtgaactttctgctgaccaagtttatcagctgctggagggaaaatagtgcagatcaaacaaatactttccttaattgaagaacagcaaatgtctcctgatgcaggactggagctaattcgcacttacagaaaagaacaaatggaaaaaaaggcggagccggaatcacaagctccgtccccaaccattttctttaagaacgattgggtaagaacaaataacattgatatgccgaatcagcaggcaccggggaatatgctgatttttgatcaggataaccgtctgtttcagcatgccgagatgatgaatggagatcataaccgtgtcattctcgtaacgcccgattctgattatagaattgaacggaatagatgcacaatcaatccttctgatgaaaatcatgtcgaaatgctgctgtctgatttggctgaaaacggatttacacctgatgtcgtgctttatttatggaacggagaaatcagagaattcactgaagaatccgttaatgaaactcttcgcagagggatcaactcgctctttttattatcaaaagctttaatgcggagaaacgaacctgttacgttattgcatatttattggacaagcggtctgaatcagccgtttcatgaagctgtcggggggttcattaaaacggtaaacatggaaagctctaagcttaaagcgaaaaccatacagatacgccctgaggattctgacaaaaatcctccggtttccgagatgtgggatgctgcaatcagtgaaatacagcgctttcaaacggatgaatgtgagattttaatagactcatatacccgttatgtgaaagggctgcagcatattgatattccggaacacgccaacggatctgtaacgtatcaaaaaggcggcatatatatcattaccggaggagcgggaaaactcgggctgctgtttgcggaacacatcgctaaagaaaaccaagccgtgattatacttacaggccgttcttttttaaccgttgatcaaaaagaacggatcagtaagcttaatgagagcggctctattgttgaatatcagcggacggacatcacagatcgaacagaggcagagcgattcattttcggcgttaaacagcggtacggcagcataaacgggatcattcatgctgccggcatccttcgtgactcatttcttgtaaacaaaagtctcagtgattttacggacgtactgaaaccgaaagtttacgggacaatctggctggatgagctgacaaaagacgaagatcttgatttttttgttctcttttcttctttttccgcttacggaaatgccggccaaagtgactatgcgtacgcaaatcattttatggacagttttgcagtgcttcgatctcagctctcccgaaacggaaaaaccctttcaatcaattggccgttattgaaagatggcgggatgagtctcgacagcaatggaatcaaccaaataaaagaaaaatacggaatgactccgatgcgaacttcctctgttttggaagcgtttctgaaaatgctgcggtcttcatttaccagcttaatgcctgcagaaggaaagcggcataaaatgataaaagcgctttcgattcaaagaaatacagctgcagcagatcaagatacactcacggcggaacacgatgaagaagaggaatatgctgcgaaagaaaaagtcaatgactatttaatcaagatcatcagcggtgtcttgaaaatccaagctcataaaataaatgcgaaggactcttttgagaaattcggaatcaactcacttatgatcatgtcacttatttcaaagcttgaagatactttcggggatcttccaaaaacaatcttttttgaatatcagaacattgaagagctttcaaacttcttcctaacatcttttaaagaaaaagtgcttaaggccgcaggggcagctccggtaaaaagagtgccgaagaaaagagaaaatctgagtaaaaaacagcaccggcagcagagggttgcatctgcaccgagcatggttcagccgggtgaggatattgccattatcggtgtgagcggaagatatccgaattccgatactcttgaggagttctgggaaaacattgccggagggaaaaactgtattattgaaatccccgaggaacgttgggatttcagatcgaattacagtcctgacagaatggagaagggaaaaatcaacagtaagtggggaggttttatcagcggtgttgatcaattcgatccgctgtttttccacatttctcataaagaagctgagctgatggaccctcaggagcgaatttttctcgaaacctcctggcatacgtttgaagattcaggatatacaaaagagaagcttgacggtatgaaagccggtgtgtttgtcggagccatgtacggacaatatcaattattcggcgcagaagaaactgcgcggggcaatccgattgcgctcagttccttcttttcatccattgcgaacagggtttcatacttttttaatctctccggcccgagcattgcactggatacgatgtgttcatcatcgctgacggccattcacttggcatgtgagagcattaaaagaggggaaagtgaaattgcgcttgcgggcggcgttaatgtgtccatacaccccagcaaatacctttggctgagtcaaggtaattttgtttccaccgaaggattgtgcagaagtttcggagagggcggagacggctatgtcccgggagaaggttcgggcgccgtccttttgaaacctttggaaaaagcaattgctgatcaggatcatatatacggagtaattaaaggaacatctgtaaatcatggcggaaaaaccaatggatttacggttccgaatccgaatgcacaagctgagctgattgctgaaaattttaagaaatcgggcatcagtccgcgatccgtcagctacttggaagcacacggaacgggtacctcgctcggagatccgattgagattgcaggattgacaaaagcgtttgagaaatttacggacgataaacaattttgtgccataggctcagtgaagtctaacatcggacatttggagtctgccgcaggtatagcagcccttacaaaagttcttttacaatttaagcatcagaaattggcgccatccattcactcggaacagctgaaccaaaatatccgatttgaaaagacgcctttttacgttcagcagaaagaagaagagtggcggaaagaatcaggcgcctccaacaggagagcagcaatcagttcgttcggagcgggcggagcaaatgcccatgtcattgtggaagaatatcaaaaccatgcggacacacaaacaataagcggtccgtttgccgcagttctctctgccaaaaatgaagacagactgaaagaatacgcccggcgccttctgcaattcacagagcgggagacaaaggtctcggcagctgatatcgcttttacattgcagacatgcagggaaccgatggaagacagacttgctgttgtagcttccgatttgccggaacttaaggagaagctgagaactttctgtactgaaggaacaattggagagggcgtatacaaagggaatgttacgaaagattttgataaagtctttatctttcatgatcaaaagaggaaagataaattcctcgaggtgatgatggagacaaaggacttgaatcttcttgcaaaattatggtctttcggggctgatattcattggagagagttatatgaagaatataccccgcaaaaggtcaagcttcctttatatccatttgctgaggagtcttactgggtgcctcgaaaccaaagtgcaacatttccggaaatattgccgcggcagtcttcactgcacccgcttctggattcgaatgaatctactctggaacagcagttttttaaaacgacattaagagaaaaagagatttggttaaaagaccacatcgtaaaaaacaagagcattctcccggcagctgcttttcttgaaatggcatgcgcagcgggaacgcggtcatatcgaaagaaaaaggtcactcgtttaaaaaacgtgatatttgccagaccggccatgcttttgcaagagagcctgaccatttacactcacatttccgtaaaagacggcagcatattatttaacatgtcacctgacgaggatgctgctgtaaggactggatttgtgacgggggaattagattatgatcatcattacagtgatgatgatatagagaacattgacagacaagagattataaacagaagtgcttttgtccgtgaacaagatgaatgttacgagtattttcgggagaacgggttcctgtatgggcgcgcttttcagccgattcaacgtttatggggcgggaaaacagaagcggttgcacacttattgctgccaaaagaagccgcatatgctcttgaacattatacattgcatccgtctttaattgatggggctctgcaatctttgttcggcattacggacggaagagaagaggcatctgtttatgttcctttttcaataggagaggttacggttcggaaaaaggtttcagcagaatgctgggcttatgcgcgtaaaacaggccaaaaaggtcaatccgagcttatttacgatattcagctgcttgatgaacaaggagaaagacttgcaggtttgaaggatgtaaccattcgtaaaaaagaaacgttttccgcggaggcacagactcgtgcaacagcggattccaatggtaagaacgagagagtaaaagagctcctcagacaattaaaagcgggcgaactgactgcggaggaagcagattatgcgctggagcgtatgcaggattagtttatcattttgcggcagtgccatttgtaaaggggatgaagatttttatgaaagaagcccgtcatattagaaaaaaagtactttctgacatagaaagcggcatcatttctttggaagaaggagtaaagcggatacagcagcttggttctcattccgcagggggtaacggacaggcgatatattatcagacggtctggcagcggacagatctcagcattcatgtaaaaggcggccggcgtgagggcagccttttattatttgataaaaatgaagatgtgagtaaagaacttgctgcattgcatgatacaagggttattttggttaagccggggaaagagtttcgaaaaaccggggacggtgtatttgaaatcgacccccgctctgaaagagattacataaacctgttaggatggcttatagaagaagagaagtcagatatacgggaagcggtgcatttatggtcagacatgccgtttgaaaaaacagagagagcgattcgtgaacaatgcgacagcggagtctattctttgtttttattacaacaggcgctcttcaaaaataactgccgcaaaccgatcaagctgttatatggatatttttcgcatctttctggagaacagcctctttacgcggcggcaagcggatttttgcggacattgcagctggaaaatccgttaatctcagcaaaaagcattgaaatggagcagtcaatagcagctgttcacgcagctgatatcatacgcaatgagctgagtgatttccagccttcagatgtagagattcgttataaagacatgcagcgttatgtcaaacagctcaaaacgtatgaacccgaaaaaaattcccgaagcggagatgtgccgctgagagaaaatggagtatatattatcgcaggaggcgcgggcggattaggatttacctttgcagaatatttggcttttcaaacaaaatgctgccttgttttaacaggtagatctccgctttcagatcatataagaaaacagctgagacgattagaggatgccggttcgtcagctgtttatgttcaggctgatattaccaataaggaagaagccgaatatgtagtcaaaacagccaaaacttcttatggaaaagtaaacggggtcattcagggcgcgggaatcatccgtgactctttccttcttaacaagtcacgagaggaattcgatcaggtaatcagaccgaaagtattgggtacgatgtggctgaatgatgctgttgagaaagaaaatcctgactttttcatttgcttctcctctacttccgcagtgttgggaaatgtcgggcaatctgattacgcgttcggaaacagttatatggatcatttcatgaatatgcgttctgcccaggattctgatacgatttctctctctctgaactggccgctgtggaaagaagtcggcatgcaagtggatgagcgcacggtagagacaatgaaaaaggcgggtttttatcctttagaaaaagaggaaggtaaagaagcgtttgcagtcgcattgtcctccggtttttcgcaatttactgtattttacggagatgagcaaattgacaatcatgttcagcaattatatgaacgaaaagacaatattcaggcagacgaaggaacagggagaaatatcgaatcatttgattcagagaaactgaaagctgaaacatctgatttcatcataaaagtgattgctgcagaattcaggatgcctgcagacaaaatagatgcagaagaggcattggaaaaatacggacttgattccgttatgattatcaatatgacgaatgagcttgaaaaacatttcggcgcgctctcaaaaacgctgttattcgaatatcagactgcggcagaattgtcacagtatttcgttgaggagcacagggatactcttcttcataaactccggttaggagaaaacgggagcagcaccccatctcagaagaaaaaagatcatgaacagacagccgaagttaacgggaaacagaaaatccagatgaaaaatcaggtgcagcaggagaagtatcatgacaatgatatcgcgattatcggtatcagcggacgttacccgatggcaaatgatcttgatactctgtgggaaaacttattgaacggtaaagactgtataactgagatacctgaggatcggtgggattcggggctgcactatcagcctgcggcgggcgacgaagtaaaaaaccaaagcaaatgggggggatttattgacgatgtgtatcattttgatccgttgttctttaatatttctcctgccgaagctgaattaattgatccgcaggagagactgtttttagagacggtttggcacaccatagaagatgcggggtacgcaaagaaaacgcttgaacgaaaaaacgtcggtgtttttgcaggggttatgtacggccaatatcagctgtacagcgttggtcacgaagcggccgtttcttcctcatatgcatcaatcgccaaccgggtatcgtacttctttaatttcagcggaccaagtattgctttggacacgatgtgttcctcatcattaacggctgttcattttgcctgtgaaagtttaatcaggaatgaatgtgaaattgcaattgcaggaggcgtcaatttatccattcatcctcataaatacgaactcctgactcaaggcggatttttatccagtgatggccggtgcagaagcttcggttccggaggagacggctatgtgccgggagaagggacaggtgccgtgctgctgaaacctgtaaaaaaggctattgcggacggtgatcagatttattcagttattaaggcaacagccatcaaccacggtgctaagacgaatggatataccgtgccgaatcccaaagctcaaagtgaggtcattacgagagccttaaaaaaaggatttattgatccaaaaagcatcagctatatagaagctcacggaacaggcaccgccttaggagatccgattgaaatcagcggtctgaccagagcattttcaggtgccgaacgcgataagaaaacatgcgcgatcggatcgattaaatcaaatattggacatcttgaggctgctgcaggcatagcgggcattacgaaagttattcttcaaatgaaacataaaacgattgttccgtcactgactcattctgctgaattgaatgaaaatataccgtttcaaaaaacacctttttatgtaccggacagtgccgaaaaatgggagtcatccgttcccaggcgtgccggaatcagttctttcggggcaggaggagctaatgcccatgttattttagaagaatttgcggatgaagctatctctcctctcgcggctgaagaacctgaacagcttttatttgttttttctgcaaaaaatgccgacaggctggcagaatatgcaaaacgcgcaaaagaacatatagcagccagagattatccattagaaacacttagaaatacagcatttactttacaaaccggcagagaagaaatgccgcacagattggctgttatcgcctccacaagagatgaattgcttaaaggactgacagactatactctcggaaacgcgacggatcatatttttacaagcggcaaagacacaacagaagctcaaaggatgaataaagttgaaattgaagaagcagccgcaaacagagatcttttgaagattgctgaatactgggttggcggtaacggggtagattggccgtcactttataaagatgccactctgagacgggtatcagcacccggatatccatttgccaaagagctgtgcagaatagatgcgcaaaatatgggaagccgccggatgaacgttaataacgatctgcatccttacatttcatgcaatatatctgattttaaagcacagaagtttcttatcaatgtaagcgataccggtttgtatataaaaacaaagtatcaagacaaggaaatgtttccgtttctcagccagattgaaatggcgagagctgccggagcgatggcttcagggaatccgattattaaattaacagagctctcctttagagaaccgatgttacaaagcggaagcaatgagcagatccggattgtattaaccccggataatcagggtgcatcgtattctatagaaaaacagagcgactcatccatttattcctcagggcggctcgaattagaaggcggggcgtacgagaacagaaatattcatcttgagccgtttctgtctcagcgcgcagaccgcataccatacgaagcgttttatcagcggcttgccgaattcggatacagctgcagtgacagtctgaaagcggcagagtactgcgtcagcaggaacggacaggtgcttttaaagataaaagcaaaggccgggccgaaagggtgcataatcaaaccggaagttattgagagcgtatatcaagccgtcatataccttgcggggggaaatgccggagagctcccggaaaacattaaagaatgtacgatttttgatcatgagactgaacccgtttatgtatatgcagaacaaactggagaaagcgattcggcttatgatgtgtatgtattagacaatgccggcgggattttgatggaactgagcgggctggtttttggcgaaaagcctaataaaaatgtgcgtttttatgagcataagtgggatcaaaaaaaacctctgattgaaatcaaagatagggagccaaaaacaattctggtctttgcaaaagatgaagcattggctggagctctgaaaaatcaatcagacagccgtgtcattctcgtcacgccggatcagcggcagaccgatcaaaatctgctgacattctgtgtaaacccggaagtgacatcagattacattcgtttattcgaagaattggataaaaaagggttttctcctgatgtcatcttgcacacgggagaaacattttacgcgggtgaccaccttctcagcggcctggaatcaattttttatttattaaaagccctgagcgcccgcagtgacgcctctctttatcttcattctctgcttcttgttcactcttttaaagaaggcgtgaatgatccgtatacgggcgctcttgcaggctgtttaaaaacggcgaatatgttggtgccatccgcagagaatgtgaagtcaatcggtttttcagaacgtatatcaattgaaaaaatggctgaattttgtcttaacgaaatggtttcaggcatggaacggcaggcggaagaagttaaatatataaatgacaagaggtttgttaagacattaaaggagtatgtattcaatcatacagagcactctcatcagctgaaacaggaagggatttacctcataacgggcggtttgggcggtctgggcctgattttcgcaaaatatttggcctctcaatatcaagcaaaattagtattgacgggaaggtcaccgttaactgctgataaacgccataacattgaccggctgcaggcgcttggaggagatgcggtatattatcaagctgatgccgcagatcaaaagacgatgggacgggtcatagaagaaacgaaacggacttggggctccattcaaggcgttattcattcagctggtcatgccgatgatcggttatttacagagatgaatctggatgatttttcagatggcatgactgctaaaattgaaggcacggtatgtttagatgaattaacgaaagatgagccgcttgatttctttatcgtattttcttctatttcttcggtcttcggagattttggacaggttaactatgcgttgggcaattattttcaagatcaatatataaattggagatccgaacagagccgccggcaagagagacaaggcaagagcatttcgattaactggccgttgtggcgtaaaggcggaatgcatttaaacaaagaagcggaagaagcatatctttccgcatccgggtttgattatttggaaacggaagaagggatagcggcttttgagacgattttggcaagtgactgtccgcaaatttcggttgttaccggggatgccggaacaacaccagcaagaaaagatctgccgcatcaaaaagtaaatacgcttccggttcgtcaagaggaaatttcttatacagcaccggcttatacagacaatgtcctggaagaactgaagcaaatggtgtcggaattattgaaaattaacattgaacagctggatacggcagagaatttcggcaatctcggctttgattctatcagtttgaaaacattagctgtccgactgaataaaaaatacaaacttaagctgacacctgccgttttgtttacttacagccatattaagtctctttcagaatttctaaacagtgaactgcgtactgttgcaaaagggaatacagatgcagaaaaaaacatttctgaaaaaaggaaagtagtgcacgctgggaaaaccaccgggaaaaccgtgaagccgccgcgaagttttccgttaaagacaacaagacaggctgaccatcatccagagaagcagccagttgccattatcgggatgagttgtgtttttccgggatcaaaaaatgcagatgagttttggatcaatttaatcaatgaaaaagatttgattcaggaaattcccccggatcgctgggattggaaaaaatacgccgaaggcaaaggaagcagcgaagtacattcaaaatggggcggctttatcacagatgccgataaattcgatgaggcgtttttcaatattaatccgcgggaagcagaactcatggatcctcagcacagaatttatttgcaggaaacctggaaagcgatagaagatgcgggttacaaagcttcaaagctgtctggcaaaaatatcggggtgtttacgggcattcaatttaatgattaccgccagctgctgatgaggcattcggacggggcgcatgcgtttgcgggaaccggaaacagccaggcgctcatcagcaatcgtgtatcccactattttaatttcagaggtccgagtgagtccattgatacagcctgctcaagcagtcttgtagcaatccacagagctgtgcgctcgattcaaaatggtgaaagtgagctggcggtagcaggcggggtttcgctgcttttagatccagtcacgcatatgtatactgataaactcggtattttgtctagagacggccggtgtaagacatttgataaacttgccgacggttatgtccgcggtgaaggtgcagctgttctgttattgaaaccattgcaagcggcaatgaatgacagagacaatatttacggagttctgagaggaaccggagcaaatcacggaggaagatctgcttcattgaccgctccgaacccggaagctcaggcagaactgttaacgtctgtttacaaaaatgccgatattcctgttgatacgatatcttacattgaagcacacggaaccgggacagaactgggagatccgattgagattgaaggcttgaaaaaagcgtttggatcttttgagccgcatccaggaaagaatcatgatcaatattgcggcatcggttcagtaaaaacgaatatcggtcatttagagcccgcctctggaatgccggggctgattaaagtattactatccatgaagtataaaacattgcctgccacactacatgtcaatgaactgaacccttacattcaattaagcggaacaccgtttcatattgtcaataaaactatgaagtgggccagattaaaagatcgaaaaggaaatgaaattccgcgccgcgccggagtcagttcctttggattcggcggggcaaatgctcatgtcatcgtggaagaattcgaatacggacaagataaagcagtaactggcgagcgggaacaaatcattgttctatcggccaaaacaaaggaaagactgatggttaaagccaaagagttaacaacgtttttacatgaagaactatcagttcaattcagtcagcaagaggtgcaggaacgtgatttgcaagaggcggttcgggaagcggcagcgggtatcctgcgtttagataccgcagatatagatgcaaagacacctctttcggaattcggatttgatccgttggcttattccgaattaatctcttttataaaccaaatgtacggcacagaaatatcacttgacatatttcaggaattaaagacactgagcgagctgtgccgctatatcagcagcatccggaatcgatcagctgataaaccgtataacggcaattttagagaaaagtccggaatcggtcttgaagaaatagcatatacgctgcaaaccggaagggaaccatttgaatgccgccttgcgatcacttgctcgaataccggagatcttcttgaaaaattaaacggttacatccaggggagcaggctgcaaggtgtttatgaaggaaatgtaacggattttgatagtctgtacgctcctttattcggcggccccgaaggtcatgcatatgttcaatcattgattcagcaaaacaagccggccaaactggctcagttgtggacgatcggttgtgaaatcagctgggaagacttgtatgaggaggaactcaaaccggttaaactgtctcttcctctctatcctttcagcaagaacagacattggattcatttaaataaagatgaagcgcagaaggctgaggctttatcgaacactgagcttcacaactcaaataaagatacagcagatggagaaatcatgtcgcttcttgaaaaagcacaaacaggtgagatgaatacgaaagagacgtcagagctgatagaggagttgcttttccatgaatgaaaaaacgatgcaaattgagcaaatcgtgaaaaaggtgaaagaatgcagcctgacgcctgaagaagggctggaattaattaagagcttggggaaaacccatctatatgaaatggtatgggatagacatgaatttaaaggcagtaaaaaattcccgcatacgaaagagccaattttatttttttgcgaagacgacagcatgtataccgtaatgaagagacagcttgaaggttatgaggcgcctttcatttacgtgacttccggcgagcgtttcgaagattgccggaacggtcgttttacaatgaactttacaaaaggtgaggattatgatgcgttatgcggggttctgcgttctcaaaatataagaccccgccatattattcattttttagctgccgggctcttcaaaaatacagaagatgcaatgagaaagcagctcaataaaagtctgtattccttgtttcaaatgtttcatgccttcatggcgaacaaactttgtccgaaagcagaaattttgtatctgtatgaaaatgccgagggtgaggttcagccgatttataacgcggttgaaagttttcttaagaccgtacaggccgaaaatccgaatttcacatgtaaggctgcagagctgaaatcaatgtttgacgagccgtttacaaagcagcatattgcagatgtcatctcttttgaatggaacaatcaatgtaagacggaccactttacctgttatgagccgaggcattattataaaaggcagcttcaaagagtaaaaaaagaagatggggagaaacatagtttcagtgtaaaaaagaacggtgtgtatttaattacgggaggagccggcggtctcgggtatctgtttgctgaatatctggcgaaacaggcagaagtcaagctgatattaaccgggcgttccccggcctcccgtgaaacggcgcaaaaattaagcgctcttgaaaatctcggcgctaaagccttatatgtcccggcagatatttcaaaggaaaaagagacggacgctctgattaagcacattaagcagacattcggagaattaaacggaattttgcacagtgccggacttgttaaggatgcatttatcataaaaaaaacgaaagaaagcatagaagaagttatagcgcctaaagtattcggaaccgtttggctggataaagcagctgaagaagagcctctagatttcttcgttatgttttcatccctttcggccgttctgcctaatgcgggtcaaagcgactacgccttcgctaacggatgtatggacggattcacccagtatcgaagcattaagggacgtcccgggaaaacactttctattaattggccgttatgggatgcgggcaatatgacagtcgggccgggagagctgcaggctttaagacatgcagggctggaacttttatccgcccaagcagggcttgccgcttttcaggacagtatgagccgctctgcttctcagctggctgttatcagcggagacaaagatagaataagtgaattactctcaactgaccataaaaagatagagactgtgcctgaaaacaacagtaacctgccgcaattacatgaaaaagatctgaaaaagcaaacggtccgtcttttgacagagatcgtcggagcggaaacgggaagaccggcggacagtattttacccgaggatacgtttgaccgttacggaattgattctctaacgattttaggtcttaactctcgtctggaaaaatattttggaagagtgtctaagactcttttctttgaatacagcagtgttgaagagctgtcagagtattttcttgaacactatcagcatgagttgcagaaggcgtttttaccggcagccgaacagcgaattgatcattcggctccggcgaaacgggagaagctttccgtttcccgcataccatccgcaccttccgaggaagatattgcgattatcggtatagccggccgctacccgatggcgaaggatgtggaagagttttgggaaaatatttcttccggaaaagattgtataacggaaataccgaaagagcgctgggattttcggaaatattatcacacaggtgacaatgcccgtcatgacagcaaatggggaggttttataaaagacgctgataaattcgatccgctgttcttctcaatttcgccccgtgatgccgagttaattgatcctcaggaacggttatttttagagacagcatggcacacgtttgaagatgcgggttacacaaagaaaaagttgaaacggcataagacaggtgtatttgtcggtgtcacctacagccactatcagttatttgcagccggtgcttcagatgatgaggaacgtcaggcgctcttgtcttcttattcgtctatcgcaaaccgggtgtcatatttctttgacctgcacggacccagccttgcaattgatacaatgtgttcttcttcactttctgctgttcattttgcatgtgaaagtataaaaagaggagaatccaccctcgccatagccggaggcgtgaatttatctttacacccggataaatatactttgctttcccaaaatcattttgtttcaagcgatgggcgctgcagaagctttggagcgggaggagacggatatgtgccgggagaaggagtcggggccgttcttttgaaatcgctttctgccgcgaaggatgacggggacaggatttacggtgtgattaagggaacatctgtaaatcacggcggaaaaacaaacggatacactgtgccaaatccgggcgagcaggcaaacgtcatcagtgaaactcttgataaggcggggattgatgcagacagcataagttatattgaagcgcatggcaccgggacatctttgggagacccgattgaaatttcaggattaaccaaagctttgcacagctcgaaaagcgattatcgttgtgcaattggttcggttaagtcaaatatcggacacctagaagctgcggcgggaattgcttctattacaaaagtgctgatgcaaatgaagtataaacagcttgctccttcccttcattccgataacttaaatcctaatattgattttgaggaaacaccgttttacgtgcagtctgaactgactgattgggagacgccgcaaaatcaagccagaaggtcaggcatcagttctttcggcgctggaggatctaatgcccacattatcatcgaagagtataagaatgaagaaaagatggaaacggtaaagagcaacaatacgcaaattattctgctttctgccaaaaatgaagaacgtctcagactcttgattgatgcatatataaatgaactggggccaaaaacgtcactagctgatgctgcgtacacctcgcagaccgggagaaacgctatggaagagcggctcgctgttgaggttagcagcattgacgatcttcgcaataagctgacgatgtatttgcggtcagatcataagttaaacggtttatataggggaaaggcccgccgaggcgctggtcaaaagaatgccctgtcagccgcccactttaaaagtgcaagagaaatggccattcactgggtgaacggaggagacgttcaatgggaagagatgtacactgcggaattaccgaagcttatctctcttcctgtatatccttttgaacggaacagatattgggtgcctgccgcaaaagctgcacagaaacagaaaaaaacaggtgtaccgcaaagtctgccccatgcaccgattgacttatcatttgatgtattaaaaaaatcgtggaaaaaacaaaaggctgcgccttccgcttttacgaaaggacaggtgatgatcctggctaatagtgaaagtgagcggcttgcattcgaattgtttgattcagatcctctgattgaatccgctgtcatttgtgcagataactgggatcattcggatggggaagccaaaaaaacggctctagcggtcatagaagaaaatccggaaatcatcggcatgattgacctgtcagatttgcggagtgatcaaaacggggcacgcaccggcacaatcgggaagctgacactgctgcaggaaatcataaagacacgtaaacagcttttcgttttacatgtgaccagagggctgcagacatttctgaatgacaagccgtcgttagccggagccgaaacagccggactatataaaatgctgagtgcggagtatcaaaagataaaatcaaaaacaatagatgtagacggtcatgtcgggactgcggcggaattgagacaggtaatcacagatgaagcttacgctgacgggctgtatagtgaaatctgctaccggaacggtgaacgttatattccatacgtcgagaaattacatgcagcggaaataaaccggaaactatccggtctgccagtatgccgtacggatcaaaccctggttattacagggggaacaagagggatcggagcagaacttgccagacattatgccggcaagggagtcaaaaaacttgtgttgatgggagtaaccgaccttccggaatctgataaaatagccggcatgttagaagacaccgatgaaaagtcacctctttattcgaaattacaactgctgcatgagttggatcaaaagggagttcaggtggaagtgtattccgggccgctcacggaaaaagaaacattacatcgcttcttttcagaggtgaggatgaagttcggcaaaatcggcggggtgattcattgcgctggtgcagccaatcattcgaatccggcttttattcataaatctgatcaagaaataagagaagtatttgagccaaaggtacaggggatgcaggtacttcatgacatttttattgatgacgaacttgatttcttcattttgttttcatctgttgcgagcgcttttcctttattaggcgccggaacaagtgactatgccgcggcgaacgcttttatggattactttgcggcgtatcagcatgcagccggcagaacatattatcaatcaattaactggccgagctggaaggacattgggatgggcgaggtgacaagtccatcatatcaggcacttggtttactttcacattcaacagaaacaggtattgccatgctggatgaaatgatgacgataaacggatacccctgccttataccggccaagacaaatccggagaaattcatgctgcagcagctgctccagacaagaattcaagctgctaaaaataacccggatgctgaggaaaaagtgatttctggtcagggagacaatgaagctataatcaggaagttaatggagattttttccgcggagctgaaaataccttacgggaatttagatcaggatacgtcttttgcggattacggagttgattcaatcttactggttcagcttgtcaaaaaagcggaagatgcatttcaaataaaaattgaaccatcagcttttctggagtatccgagtttttcacaactaggcgtctatttaaacgaattatttgcaagtgaggggatcagtcctcaaattgattcagaaaacattgaggttcggaaaaaagagcaacatataaatcaaaatgcttccgaagtacgggacagcggatctcaaatacaacaaaccagtctgaaccaaatcgctattatcggaatgggctgtgagtttccggatgctccggacacagaaacgttctggagaaatttgaagaaaggacaaaatagtgtccgcgaagtcccggcgtcgcgatgggatatttcttcatactactctgacacctatgaaaagggaaaaagtatcagtaagtggggcggatttcttcaagatattgagtctttcgatcccgcgttttttaatatgaacaaaagtgaggcatcagagcttgatccgttaatcaaaaaatgccttgaggtcagcgtccagacattgagagacggcggctatacaaaagaagaagtatcaaacaaagaagtcggcgtcttcatcggttcgcggaccgggacgtttatgtccaaaataggttccccttcaaaaaatacgatcgtgggtataggacaaaatttcataggcgcgcatatctcacacttttttaatctgaaaggaccgaatctggttgtagacacggcttgttcttcttcattggtcagcgtccatctcgcttgtcaaagcctgatgtcaaaagagtcagatatggcgattgcgggcggagttgacattttgctggatcaaaagccttacgtcatgctgagtgaggctcgggcgctttcacctgaaggaaaatgtcatacatttgatgagaaggcagatggatttgtaccgggagagggatgcggcgcagtccttttgaaaagacttgatgacgcccttgccgaaggtgacagaatttacgcggtaattgactcatccgcggttaataatgacggacagacaatgggaatgacaacacctaatccgaaagcgcaaagcgcagtgataaaaaaagccctgaaaaaaggcggaattgatgcagatactctcagttatgtcgagacgcatggcactggcacgatgataggagatccgattgaattaaaagcgctgactgaagtgttccgggaggttacggaagaaacgcaattttgcggagtaggcagcgtaaaaacgaatttcggacatttaatgagcgcagcggggatagcgagtattataaaggttgccttatccataaaaaatcagatgctcccgccgacattacattgtaaaacgccaaatccgcgttttaaatttgatcaatcgccattctttccgaacacgtctttaaaagaatggcgtcccagaaaaggggttttgagagccggaatcagttcttttggattcgggggcacgaacgcacatatgatattgagcgacagccatctcacattaggatatggagagacaaaaagacacccgctttctccggttatattcaataaggagcaatgctggattgacaatggagaaactccagaaaaggaagagtcagaattgctgattcctttacttgatttcaaagaattataaagaaaagaaaaggaatgagacaggtggccagtaatcaaaactatcagttcacattaacaattaaacatacggactatattgtcagggatcaccgggtgcatggcacccggattatacccggtgtcacatttttagatatgatataccgtatggcgctgagcaaaggtttgcctattgaagaactcgaatgtcagaatattttgtatttggaacctgtagcaacatcggatacctttgacagagaaatccgcatccgttttcagggattggaacagggatgggaaattcaggcgaagagcagaaaggtaaaagatgaccgcatcctggatgaaagctgggatgagaatatgacctgcaggctcatgcagaaattcccggaaagcatgagttcaattcatatcgatgaaatcaaacatgcctccgtccgtgaagccgatatggagatatgttatgactatttaaaaaaggttgatatagagcattttgaatttatgaagagtctggggaaggtttatgcgtctgatcattctgtacttgcagagttgtcgctcagccaaattgccaatcaatataccggctattttcaattgcatcccacttttcttgatgcgtctaccatcatatcgatcctttatcaggcatgtcccgaatattttacacaaggatctccggcaagccggatgaaaacgtatattcccattcatattgaatctttccgtatgacgaagcgcctggaagacaggtgttatgtgtacatagagaagcaagaccaaaatcatgattcaggggatgtcatccaagtaagctacggtttgtacgatgcatacggggagatgatcgcttattttacgcggctgtctgtgaaacatattcgctcaaaagatttaattgaaaacctgaagcagactcgtttggaaactgaagcggcttctcagccaaaagacagcctgatcagaaaagattcaatcataaatcaaagcgaaagcatcgagacacaccttaaagaattaatatccggggtttcaaatatagatctgcgtgacataaggacagacattggtttttatgaacagggcctggattcagcttctttgcttgccattgtcaaagaacttgaaaacaaaacaggggaacagctgtatcctacactcctgtttgagcagaaaacgatccgggaactcgccgcgtatattaaagaaaatcaaagaatgtccagttatttcttaacgcgaaatcaaccggctgaaaagcctgacatgaaagaaagtatgaacgaaaatctttccgctcttataacagaaggagacattcagcagctgatcgcagatatcaaagggactgcccctgaaacactctctgtggtaaaaggtttttatgaacaaggcctcgattccgtaacacttatgcaagccgtaaaggcattggaagagaaaacaggcagggaactgtaccctactttattgtttgagtatccgacgattcaaaaacttgcaaactattttgcagagagcggcgaaaaaacttccgttgaaaaagacctccctcttcatcatggagagaatcatacggctctgacctatttaacgccgcattggagacaaaaggctgccgcttggggcccgaattgcggaaataaaaagaaaagaacatgcctgctgtttcaatatgacagagagctttttcattttatgcgggaaaatgctgaaaatggattcgaaaatacacagatcattctcgttttatcagggaatcgttactcctatcacggagacggtgtttatgagatagatcacagggaggaagcccactttgacaggcttgcagctgatctgaaaaaaagggggcaaatgcccgacaccgtggtttacgggtggccggaagggtcatttgccggcccggaaaaaataagtgaacagctttctaaaggggcttacccgctattctttttcagccgggcattgatgcgcagcaaggcggaaaaaaaggttgtatcgcttttcctttatccggcggaccataaaaatgatcagccgctttacgcttcagtccatggcgcagggcagtctattttgcttgagaacccgaaactggcccttaagacaatcgggatatcagtttcagacaagtcatcgttgccggatctcacagctgaaatcatcagatgcgaatcaactgaagcgcatccgggagaaaccgatctttattatgaaggaaatgtgcgctgggtccgtgccttacgggaagcagaaccggctcaaaactcaggtttctcctttaaagaaaacggagtatacatgattacaggaggggccggcggcttaggccttatatttgcagaacatatcgcagcccaaacgaaagccaatattattttagcgggccgttctgaacttacggaagacaaaaagaacaaaatcagccgaatgaaagcaggcggttcttcggttcaatatataagaggtgatttttcagatagccgcgatgcagagcgaatcataaaaaccattaaaaggcaattcggagaaatcaacggtgtgatacacagtgccggtgtgacgcacgacactttattgattcaaaaatcaaaagatgaaattcaggaagtgatcgctccgaaaataaatgggacggtcttattggacagcttgctgcaaaccgaacctttggacttctttgtgatgttttcatcaagcagctcgatgtacgggaatatcggacagacggattacgcattggccaaccggttcatcgatcttttcgctgagtggcgtgaaggaatgaggcggaaaaaagaacgctccggcgtctcagtagccatcggctggccgctatgggaagacggcggcatgaaagtggataaacaaactgaaaaatggatgaaacaaaaaatcggtatggttccccttagtaaaaccaatgggatcaaagcttttcaagattcactctctctgaacgcatcacagctgatcgtgtttgaaggtgacaaagaaaaattggaatctgcacttcaagatacctttatggaggatgaaagccgtgagatccaaataaatgaaacagctgatacaaggcatgaggacattgccattatcggattaagcggaaagtatccgatggctgaagacttacctgaattttgggagaatttaaagagcggaaaagattgtattacagaaatcccgcctgaccgctggaatatggatgatttcttcagcgaagacagagatatgaaagggaagtcttacagcaagtggggaggttttatcagcggagccgatcaatttgatccgcttttctttcatatttctccaagggaagcagaacttatggatccccaggaaaggctctttttagaaacggccaaaaattgttttgaagactcagggtacccgagaaacatgctggaaaagatgaaagtcggtgtatttgtcggtgcaatgtggggccaatatcaactatttgaaggagaagaaaatggagtggctttctcgccggcatccgtctattcttcaattgccaatcgggtgtcttattattttcatttaaaaggtccgagtttggctctggatacaatgtgctcttcatcactgacctctattcattacgcatgccaaagcatacattgcggagagagcgatatggcattagccggcggagtgaatttgtcaatacatccgaataaatataagttcctcagcatgggacagtttctatcaagtgacggcagatgccggagttttggaaaagacggaagcggttatgttcccggtgagggagtcggagccgtattgttaaaaccattgaaaaaagcaatagaagatcaagatcaaatatacggtgtgattaagggaagcgctgttaatcacggaggaaagacgagcgggtattccataccgaatccggatgcgcaggcggaggtcatttcagaagcgcttcgtaaagctgacattgatccgaataccgtcaattatattgaagcgcatggaacgggtacgtcattaggcgatccgattgaaattcaaggactgaaagattcctatcaattgaaccatccttgcgccatcggttcggtgaaatcaaatatcggacatttagaatctgcggcaggaatcgctgcggtaacgaaagtgcttctccaaatgaagaataagcagcttgttccttctctgcattccgatattgttaatccgtttatagattttgatcaggttccttttcaagtgcagcggaaagcggctgaatggaatattccgcaaaacagcaatgctgttcatcctttgagagccggggtaagcgcttttggggcaggagggacaaacgcgcatcttatattggaagcgtatgagccgccaaaagcttttgatcatcaaagcggccgagtgatctttgttttatcggctcaagacaagcaacggctgataaaatatgcgaaggttatggctgattttctatcagaaaatgaatcgaaggataacaatcataaactgcgtcttcaggatattgcctatacacttcagacgggacgcgatcatatggaagaacggctggcgatagtggcagattccgggcgggtcattgctgaagagctttcagcttataccaggggtgaaaaaagcagcttaagctataccggtaatacattcgaatcagaagttcacaatgaaatgtctcacgtttgttcagattacgccgaagcagcatccaaatgggtaaatggaagaaagatagattgggagacttttgaggtgaatcggaatgctcgcaggatttctattccgggacaaccgctgatcaaacagcggtattggatagcggaaaaaggggaagcacttgtttcagcggatatgagtaagccgggtcaccctttcttggggagtaacacgtccgattttaatcagtttagtttcacgaaaaaaatcacccgtaatcatccgttcgcactaagtctgtctgaaggaaacgtgtcctttttcccttatgcatctttggctgaaatggctatcgtcaatgcagcggcggcatttggacaaccagttcaaacattgactgatttattgtggaccgaaagcatgaacggaataactgatatacgggaactgatgattacgctgacgcctgagcgcgactttgcgcggtttgacatatatgcaaacacaaaaaatgagaataaagtacgtcttgccaggggaaatgcgcatattgttaagcctgaaagcggtatgcttcctgaagcgcttgatattgctgaagtcaaatcagaaatgactgaacatcctgctgaatcgccttttgtcattgaatcagcgaaaaacagtgacggaatgctgtcgtttcattcattgccggatgagctttatgcaaaaagagagaattttacgatctctcctgaagcgcttgagtccgcaattcaagccagtgcgttttttgtcagcggagaaaccttcccggaattgatcggaatgggagcggcggatgtctatcagcctctcgctcaaagtttttatgtctatactcaaaaagagaaccggcagaacagccgtgatgtaacgtgtcatatgacatttacagatggaaacggaagcattctggcggagtgcagagatgtgagattcagatatggtcatgaaaaagacactgttcagacggacgatgaactcattcgtctcctgcgtaaattggaaaccaatgatattgatcagaaggctgtattgaaacaattaatgggggaagaatgatgaacggaaaacgtgaacaaatcagcgatattcttgatctgattcaaacaggacaaatgtcggctgacgaaggttatgcccgtgtgacatccattcagaatcaaaaatcacgggcatcgaaccatccgcttttttattacaagccggaatggacagaatcgttcattccgaataagaagagcgtacccttgacgggattgctcctgatttttgcagaaaatgaacggcaaatacaagaattgagcggtttgtttaagggctgtactctcttgtttgtcatccgcggaaaagaatttgctgttttacatgatgatacgatttgtatgaaccacgtgaaaaaacacgattatctaaagctgttccgatacattcatgatcattatcagctgcccgaaaagattcttcacttgtggtctgattctcaggctgacatgagtaagggaggtatacagaaacaattggaaaacggattgttttctcttctgtatattacacaggcgctgattgaactaaaatggaaaaagataataaagctgacgcatatttttcaaacagagaataaagaacaactgccgctgcatcatgctctcggcggattggtaaaaaccgttcaccaggaacaccccaattttcactatcagattatcaatatcacgcaatcagagggtgcgggagccgctcttccagcaatagcggatatatatcagagagagtgtgacgaaaaacgggatatccattttgaagtgcgctatgaaaacggcagacgttttacgaaaagctataataaagccggctcattcgatttaacccagccgctgaaacatcatgggaattatctgattacaggaggcctgggcggtctcggttatattctggcaaaacatctgtcggaaaaatggaaagcgaatctcatattgacggggcgctctgatttaactgaagagcaggagaaaaagatcgaatatttaagaagttcaggttcaacagttgaatatatccgatctgatgtttcaaaacaaagtgatgctgaacggatgtttgcttttgcaaaagagcagttcggcaccttacatggagtatttcacagtgccggcgtactccgtgactcttttatcttaagaaagacaaaagaagaaattgatcaagtcacaggttcgaaagtttatggtacgctgtggctggcggaagaaatcaaaaaaatgaaagttgaattacttgtcttgttttcatccacatcggcagtcttcggctcagccggccaatgtgactatgctttcgccaatgcctgtttggatcagtatgcagcagttatgaccgcaaaagagtctgccgaaaggatagtgtcagtcaattggccgctatggacttccggcgggatgaatattgacgatgaaggaatatcctacatgaaacaggaactcggtcttgacccgttagatgacagtgacggaatacaggctctggagaacagcttgtgtcaatcatctgaacagctgattgccctgaaaggccgaaaagaaaagattgaggatgtgctgaagcgtgccggcacaatcagcttacattcagaccagcaggaagatgccgatttgcaaaacgatgaattaagacaaaatatcatcagttatctgaaaaatataatgtcagaggaattgaaattaccggtctcactcatagatgaaaaacaatacctggagaaatacggcattgattcagtaatgatcatgcgtctgaccaaaaagctggagcaaagtatcggcagattgtcgaaaacattattttttgaatatcattcaatatctcagttagctgaatatttcctgagtcatcacagcgaacgaatgatgaaactgctgaaaccggccggcacatctgaacttgtctcatatcaaaaaaagcaaaaaagaaaaccagtggaaacaaaagcgctggtacgctctgaaggagaaggttcaaaagagcacattgcggccgatcccctttctgctgatatagccattatcggtgtcagcggcagatacccgggtgcggaaaacatcagggagttccagaatgtgctgatgaatggacgggattgcgtaagcgaaattcctgatgatcggaaagaaatgctggagggaagctgctataagtggggaggttttctgaaaaatccagaccggtttgatcctttatttttccggatatcaccgaaagaagcggcttttcttgatcctcaggaacgtctctttttagagacagtgtacaataccatagaggatgcgggttataaaccttcagatctgacccgcaaaaaggtcggagtatttgcaggcgtcacatatggaagctatcaatttttcggcgttgaagaatcacttaaaggaaatgaactggccgtcgggtctccattttctgcaatagcaaacagaatatcatatttctttaactttaaggggccgagtatggcggttgatacaatgtgttcatcctctcttaacgccattcacttagcctgtgaaagtatacgaagaggagaaagcacacttgctgttgccggcggggtcaatcttacgcttcatccgaataaatatacattattaaatcaaagccgcttctttgcaagtgatggccgatgccggacattcggcgagggcggtgacggttatgtaccgggagaaggagtgggatccgtacttttaaagccggcggcggaagcggtaagggacggagatcatatttatgcgctgattaaagcgacagcggtcaatcacggagggagaacaaacggttttacggttcctaatccaaatggtcagtctgaactgatacaggaagcgcttcagaaagcttgtattgaccctcgtacaattagttatattgaagctcacggaacgggaacttctcttggagacccgattgagatcaccgggttaacaaaagcgtttcgggaatttacggagcacactcaatattgttccatcggttctgtcaaatcaaatatcggccatcttgaggccgcagcgggaattgccggtttgacaaaggttcttttgcaaatgaaactgaaaaaactgtttccttccatacatgcggagacgttgaatccaaatatcgattttaaagcatctcccttttatgtacagcggtcattgcaagattggaagaaacccaaactgcaggaaaacggaaaaacagtaactgttccgagaagagcggggatcagctcattcggagcgggaggaacgaacgttcatatcattatagaagaatatgaagaaacaaacgtctcaacagaacatgttgagaacgaaccgcatattgtcctgttatctgccaaagacaatgaacgtcttcttgagtatgccgaaaacatgagagattttatccaacgttcactatgtcctgaagtaaaggataagcagcctgatatgaaagaaaaagtgtatgaagtactcaaaccgttagtttcggaattgcttcatatccatccggaagaaattaatattgctgatcacctgagtgaatttggcgtagggcctttggaattaagccggatggcggattttattaacgaaatgtttcatattgaactcacgatgtatgaattaactgattgcccctccattcaagcggttactgaatacttattgaaggaatatgccggagcgataagaaacctgttcccgcatgaagtgatggaaggcagccaatcggaaagcgtcgttttacgggatctggcatatactacacaatcgggcagagaagcgatggaggccagagcggcgattaccggtacctctcttaaagaaatgaaagataaattatttgagttttgccgcggtgacaagcaagttccaggcgtatatgttcatcagcaatcagcagatgcatttgctgaaaaaatgaaggcgttaacggaaggcagagcaggtgaattgtttgtaaagaccattattgagaacggtgaagcggaaaagctggctcaattatgggtttggggggcggatatcgactggaaatccgttcatcaacatttacagcagccgggtaaacggatctcaattccgacttatccgtttgcaaaagaacgttattgggttccgtccaggactaagaagacagagatccctcagcattcttttcaacatcacttgcaaaaaaaatggagggagaatccgtttgtaaatccatccgaaacaaaagagtacggactgacagtagcatttgtaaatcaagacacagaatcaattgcccgcaccatttgttcggatatagatcaggagaatctgattgtcatcaaacatcactcttcatttataaaacactctgatcaaatgtttgagtgttctttattagatgaaaaccacgcatacgccgttatccgtgagatcttctcgggcggtgagcggcaggtcgaaaatatatttgatttctcagatatcggaaaccagagtgaaaatcagaacggtatcccatatggtaaattcttatttatacaagaaataattaagcggagtaaaaaggaaacaccattatccattttacaaatcaccaatggcttgcaggtatttaaagcggaaaaaccaaagctgacgggggcagaatcagcggcttttctgaaagccctttctgcggaatacggctttgttcatgtgaaaacaatagatatagacagcatgaaagaaacgcatgagctgaaacaaatctttaagaatgaaaggcaatgtaccggagagaatgaagtatgctaccgcagcggcgtcagatatgttccgtattttgaagaagaaagaatccataccggcgggcctgtttcatttcctgcggataaagccatcgtgattaccggcgggacagggggcattggcagagcaatagctgaagatttggtgaaacggggagtgaaaaaactcgtgctgacgggtacgcgtccattacctttgcgaagtgaatgggatcatttgctgaaagagggcagacaggacgaaaagacagtcagcaatataaaactgtttcaaagttttgaagagaaaggtgtcaactatatgtattacagcggttctctcacaaatgaagagaagctgcgttcattctttcaccaagtaagccttgaatttaaagatataagcggtgtcatacactgtgccggactgcacagcggcggaaatccggcctttattcataaaagaatgagtgaatttaagacggtgtacgggccgaaagtcactggacttcagaatttggagcggatttttaataataggccgctggatttctttattctattttcatcaattgcagcacagtcacccaaactgtcgaaaggaatgactgattacgcgtctgcaaacgcatatatggactatttcgcggcttatcattttcaaaaggggagaacgtatttcacgtccatcaattggccgagctggaaagaagtcggaatgggtactgtgacgagtcctttatatgatgaattgggactggactctctatccacacgggaaggactggcgattttgtatcatgcactggagagaaaatcggccaatatcattcctatcgtgaaaaaaggaacagtgtttcatgcagacagtctcctgaacatcaataaaaccggcggagcttcggttccagtccgaagacaggagactcccgacacttttgatcattcagaagggcttgtcagtgaactttctgccgtatttgccgaggaattgagcattccccttgaaaagcttaacccaaatacggattttcaggaatacggtgtggattctatactacttgtcagcattatacatcgaatagaagcaatgattcagaaaaaaattgaccctactgtgcttcttgaacacaacacgattcatggtcttgcggaatatatcggtaagacggcgccgccgttgaaaaaacaagtcgaacagactgattctcaaagcagcaatcagcaagatatgcagtctgtgacgagccgaaatacagaaccgcagacggcttcctctgcaaagatagctgttatcggaatcggatgtaagttcccgggagcggctgataaagaggaattttgggacaatctgagaaaagggaagaatcatattaaagaagtacctgattcccggtggaatatagaagaaaattactctccggtcaaacaaaagggaaaaagcatcagcaaatggggaggatttatcaatggaatcggcagcttcgatccggagtatttccgcatggaagaggagaaagccatccaaacggacccgctgataaggcatttcttagaaacgagtgtacagactgtacgggatgccggttatgaagaaacggaattatcgggaaaaaaagtcggcgtatttgtcggttccagaatgggcggttacggtcacaaactgccgaaagaaagcagcagccacatcgtcgggcttagtcaaaactttattgcttcacatgtgtcgcatttctttaattttcacggtccaagtatggtttctgataccgcttgttcttcttcattagtcagcattcatttagcctgccaaagcataaaaaacggtgattcagagatggcgctggcaggaggggcggatctgcttttggatgaaattccttacctgatgttaacagaaggaggagctctttcgccggacggtcagtgttttacttttgatgaaagggcaaacggttttgtacccggagagggttttggcgctgttctgttaaaaccgctggagaaagcgaaagctgacggagatcggatatacggtatcattgaagcatcagctattaataacgacggtgcgacaatgggaattacgaccccgaatcctaagcttcaagagcaggttattcaagatgcatttgaaaaagccgatatcactcccggatcagtcagctacgtcgaaactcacggcacaggcacgatgattggagatccgattgagcttcaggctctgacaaaagtattccgaagagacacaaacaaaacgcaattttgcggagtaggaagtgtaaaaaccaatatcggacacttattaagcgctgccggagcggcaagtttcattaaagtgattttatcaatatggcataaggaaattccgcctacattgaattgtgaaacgccaaatccccgctttgaatttgaaaagtcgcctttttatccgaatacagagctgagaagctggaaggatggaaaacggagggcgggcatcagcgctttcggttttggcggaacaaacgcccaccttttggtaagcggcctggatgattcatatcattccgtcagaactccgctgccgcctgctgagtttgtcagaaaagagtactggccggattcaattcggaaaaaacaaatcaaacagaataaaaaacggcttcttgaaattattgatgaaacagagtagcacctgctctgtttctttactttgtaaaagaagaaaggttgtcgagttgcatgaggttcagcgtattagtcaaacatgacgattatattgtttcagaccatgtccttcatcaagtgcgtacgatacccggcgtaacgtatctggatttaataacacgatttttagctgagaaagggatatccccccgaagttttgaaatcaaacatgttttattccgtgaacctgttgcgacgtcagtccattttgataaaaaagtcaccttccagtttacggaacaagaaaacggctggcttgttgaaacaacaagcaggaaatgggtcgctgaaaaggcggaaggtgaagcgtcagtcaacttgcaggcggaaatcataagaaaaaatgcgataaacgaaaagacaatttcaatcgaagaattaaagaaaggggccgtccggatttcggatgctgaagccgcctatcgtaatttgcgcaggggcggcctgattcataaagattttatgaaattggaaggtacggtatatgaaggtgaaaattatattctgggagaggttagtttaagcgtactttcaaaagaatatacagatgacttttacatgcatcccgcatttttggatgggtctctcagcttgttgggaatccttacatcagacttgccggatgaaggaacaaatgcgtttatccctatatatattgagacattccgggcactgcataaaacaactgggtcttgttttgtgtatattaataaaaccagtataacgcagccgccttctaaagacattttatatgcggatatagaagtatacaggcctgatggagagcttgctttttattatgagcgattcggtgtgaaaagagtcagaaatgaaaaatcaatacaaaggctggagcattcccaaaaagctaaagaggtcggcagcgcaacgaacaataaagaaatgatcagaaataatttgatccaagagatagccggcatgattgaaaaacctgctgaaacagtgaagaatgatatttccttttacgagatgggcttggattctaaacaattattagacttatccaaaaaattagaactgatgttaggttcaaagctgtacccgactttattatttgattactccacaatcggtgaattgacggaatatctgcaggagaaatacggagccgacatgacagactctatctctgatacagttcagcaccaagacagtcataaaacattaacagatgagctgtcatccattattggagaggttacaaacacaccgccaaataaagcggacaaacaccaatctttttacgaactgggtcttgactcaaaacagctgctgcatatatcgaaaatgctcgaggaaagattggatacacaattgtatccgacattgctttttgattataacaatattcatgatttagcggcttatttagaagaaaaatatgaggtgcgtaatacgccggccgcagcttttaaagaaaaaacgcaaacgaaagagccgtctgaaaagccggtgcttgaatctttgtatttacaaaaagaatggatagaatcgccattaaagtccggagaagtacctaaggaaaatacactgattttcgatttcgacagttcattgagtgatgaaatccgaaagtacatcggcagtgaaaatgttatttatgcggaagccgccgctgaatatgaaatggtaaatgaaaagcattataaatttaatccggagcagtctgctcattacaccagactgttagaagatatgaaaaagtccggagcgtttccggcgtcaatcattcattacctgtcaaaaaaagcttatactgaggcagcgttagatttgactcacagcttttattcaatcctttatttaagcaaagcgttgatccgtcaaaaaacaaaagaaaacatcaacattttgtacgtacatgacaagggtcaatatacaaatccggtttacgccgcgattggaggcttttttaaaacgctgaatgcggagcagccgaatataaagtgtaaaacggttgagatttcttcaagacaaaccattgaaaaagcacctttgcttctcaatgaattaagtgccggacatcatcaggctgtgaaatatgacagcgatcaaaaaaggcgggtgacagcatataaagacgcttcgccgcaaacaggacaaaaggccgccaagtttgcaaaaaacggggtgtatctcatcatcggaggattaagcggcatcggctggattatttcagcgtttctttatgcaaatcacggagccagcgttatcattgccgggcgatcgaaaatgacagcagacatggaagaaaaattagacagcatccgatatgacggggcaagcatttcttatatccaggctgacatgtcagataagcagcaggtcatcaagttagcggaaaaaattcatgctgattattccgaaatcaacggggtcatttacagtgcaggcgtgttaaaagactctctcattatgaataaaacagacgcggaagctcaagcggtgctgcaatcaaaggtcaatggtgtgattcatttggatgaagcgctcagagatatgcctttagacttttttgttttgttttcttccatctcctcagaaatcggaagtctgggtcaagccgattacgcctacgccaatcgttttctggagcattttgccgagtggagggaatgtatgagaaaggcggggggaagatcaggaaaaacaatcgctgtaaattggcctttctggaaagacggaggcatgtcagttgatcccggcattcaagatattatgaaaatggagtacggacttcacccattagaaaatactgccggaatcaaagcttttgaacactcgcttctcggccgaggccaccagctgatcgtgttatacggagaaaaagaaaaaatacaaaacgatttcaagccgttatccgcccgttcagcaccgcctctggtaagagattcagcgattgcagccgattttgatgcttcgtcaatcgttacggaagaagctgaaagtcctttccgaatactcggcacagcttccaatcgtcatctcgacaattatttgcattattggagcagactgaagaaaggagcccttcagcacaatcaaagcgatgccgcaaaaaaactcatcgctttttaccagacagaagaaacggaaaccgttcattttctggcaaacacagaaaatgcccggcatatggaaatattgatgagcggtaagggtgaaacaattttactgatttgcggttttgctaccactgcttacatgtggaaagaacaaatgaaggagtgggcagatcaatttaatgtaattgtcatacacacaccgggttacgggctgagtgaggggagcgccgattttacactgagcgggctggctcagacttttatcgaagtgctgaacgagataggggttgcttggccgatccacattgcggcagcttcttggggaggcatgatagggcagaggattgcctatgaataccctgaaaaagtaaaaacgctcattctttccggaagttacaccgaatacgaagaagaccctgaaagcagtgtcgaggaaaaactgaaaaatgattttatagctataggaaaatcacatgaatatgaaagtttatacagtaatcaattcctaaatgcttctattgaacgttttatgaagatacatcaacaagaaggctattctacgatcggctttttaaaagacattcatacaagaacgcttatccttacgggtgagaaggaaagcgtagttgatcagaaagaaacaaaaaggctgcagaaactgctgagcaatgcagaattaaagaaaattaagggagcggggcatcttccgaacattacacatcctgaagaattcaataaaacggtgtcagaattcatcaagaaatcagtaagtaagggatgaaaacgatacatacagtacagggggagaaaacaatgaaacaaacaataagcaatccggcatttgatatgaaacaaattaacgctcttaacggccattatcagacgatgatagacaatggagatctgcaatgtgcgagttatatgatgtcaagaggaggtgaggtttttgcagctgagtcgttaggggaatttaccggcggacaaaaagaaaagcaaacatttcagcttgatacaatcagagaaatcggttctttgacaaaagtgtttaccgctgtagccgtcatgcagctcgtcgaaaaaggtttgctcgatctgaaaatgccggtcaagctcattttgccagcgtttgataaaccgggtttcggagaaattaaaattttgcaccttttgactcatacggcgggattaagttttgagctggatattcaaaaggctgaaggcattgacttaacgaatgaggaagaatggataaactatctggtcagtacgcctttggagtacggagtggatgaagcatggaactattccagaaccggctttgttatacttggcatcattatttcaaaagtaacaggcgtatcctacgaacagtatgtaacaaagcatattattgaagcgctcggattagaaagaacgtatttttatgtgcctgatgctttaaaagaagaagtttgtgtgatcaatgagcacgagtgcgtacagctggaaaaaagtcatcacccgtattttccgaataaagcgacaagcggtctgtactcttcattgcgagatatttggaagttagctgaaatgtttagaaataaaggcagattgaaagataagaagctgcttggaagaaaaacagtcgaggcgatgctgagaaatcaaataaagcccggtcttcctttttacttcttcggagcgcccagagaggaaggcggctttggtttaggcattaatttgtggccggccggtgaccattatttcatgacagaaggaaccttctcacatcttggaatggggtggtgcggcatgttttctgatccagccgaagattttacgtatgtatttttcactccgatttccgagtttcatcctcatgccgtgctgacgccgctgaatatcgtgtgggcgggtattgaataattgacaaaagcgtcgtcccgtctgttcggcaggcgggacgattgctaactgcccgtttttatcccgcggcatcttttcaaagcctgacccgaagttaaataacttaatttactctttgtaattttttttaattatagtacagtagagcatttttataatacagtttaaagtcttttatagtacagtttggtgcaatatgatcttatgttttataagcggtttcaaaatgaagttataaataattgacggctttgtttaattactgtaaactatggttgttgatcatattgtactaataaaaaatctttttttattagtacagtttaaacgtcattatctttgcttaagcgctatgtgaatttctgaatgattaattttagaattgcagagcatgataagactgtttttaatacggatggctaaacggtatcctaaccctgttaaatcaaaagaagaggtggtttaaaaaatggctgcaaagacaaaaacttcaattgttgatagcaaaaaacaatttgatgctattaataagcagtttgaaacgttccaaattttaaatgctgaaggagaagtcgtaaataaagacgcaatgcctgatctttcagatgatcagttaaaggaattaatgagaagaatggtgtatatccgcattttagaccagcgttcaatttctctttcccgtcaaggacgtttaggtttctatgcaccgacagcgggccaggaagcttctcaaattgcatcacacttcgcgcttgaacaggacgactttatccttccgggttatcgtgacgttcctcagctgatttggcacggtctacctttacaccaggcattcctgttctcaagaggccattttaaaggtaatcagatgcctgagggagtaaatgctttatcacctcaaattattattggtgctcaaattatccaaaccgcaggtgtagctttaggtcttaaaaagcgcggtaaaaaagcggtagctattacttacactggtgacggcggagcttctcaaggtgacttctatgaaggaatgaactttgccggagcatttaaagcgccagcgatcttcgttgttcagaataaccgctatgcgatttcaactcctgtagaaaagcaatcatccgcacagacaattgcccaaaaagcagttgccgtcggtattacaggtgttcaagtagacggaatggatgcacttgccgtttacgctgcaaccgcagaagcacgccagcgcgcaattaacggtgaaggtccgactctgattgaaactcttacattccgttacggacctcatacaatgtccggtgacgatccgactaaatatcgtacgaaagaaatagaaaatgaatgggagcaaaaagacccactcgtacgtttccgcaagttcttggaaaacaaaggactatggtctgaagaagaagagaacaaagtgattgaacaggccaaagaagaaatcaaacaagctatcaaaaaggctgacggcgaatcaaaaccgaaagtaacagagctgattgagaatatgtttgaagagccgacgttcaacttgaaagaacaacttgaaatttacaaagcgaaggagtcgaagtaagccatggcgcaaatgacaatgattcaagcgatcactgatgcgttacgcacagaactgaaaaacaatgaaaacgttctgcttttcggggaagatgtaggcgttgccggaggcgtattccgtgcaactgaaggccttcaaaaagaattcggtgaggaccgcgtatttgacacgccgcttgctgaatccggtatcggcggtctcgctctcggtttaggcctgcaagattaccgtcctgttatggaaatccaattcttcggattcgtatatgaagtaatggattcaatctcaggacaaatggctcgtctccgctaccgttccggcggacgctggacttctccggtgacaatccgctctccattcggcggaggggttcatacacctgaacttcacgctgacagtttggaaggccttatcgctcagcagccgggtattaaagttgttatcccatccactccttacgatgcaaaaggactgttgattgcctctatcagagacaatgatccggttgttttcttagagcatatgaaactttaccgttctttccgtcaggaagttcctgaggaggaatacacaattgagcttggcaaagctgatgtgaaacgcgaaggtactgacctttctatcatcacatacggcgcgatggttcatgagtcgcttaaggctgctgaagagcttgaaaaagaaggcgtttctgctgaagttatcgaccttcgcactgtaagtccgcttgatattgatacgattattgcttctgttgaaaaaacaggccgcgcaattgtcgtgcaagaagctcaaaaacaagccggcatcgctgccaacgttgtagctgaaatcaatgaccgcgcgattctgagcctggaagctccggttctgcgtgttgcggcgcctgatacagtatttcctttctcgcttgctgagagcgtatggcttccaaaccataaagacgttcttgaaactgcgaaaaaagttcttgaattttaatcaggcatcataaaagacggtaaagagagtccttttctcttatatgaaggagtctgtttactaggttcaatgcttgcgaatgcataactaaaatttgcttaatcaactaggaggtcgaaaactgtggcatttgaatttaaacttccggatatcggggaaggtatccacgaaggcgaaatcgtaaaatggtttgttaagccgaacgacgaggtagaagaagacgatgttctggctgaagtgcaaaatgataaagcagtggtagaaattccttcacctgttaaaggaaaagtattagaattaaaagttgaagagggaacagttgcaactgttggacaaacgattattacgtttgacgcacctggttacgaagatcttcaatttaaaggaagccatgattcaggagatgcgaaaactgaagctcaagttcagtcgtctgctgaagcagggcaggatatctctaaagaagagactcctaaagagcctgcaaaagaaaccggcgcaggacagcaggaccaagtggaagctgatccgaacaaacgcgtgatcgcgatgccttccgtacgcaaatatgcccgtgaaaaaggcgtggatatccgtaaagtaacaggttcaggcaataacggacgtgttgtaaaagaagatatcgacagctttgcaaatggaggagcggctcaagaagcggcaccgcaagaaacagctgcacctcaggaaacagctaaacctgcagcggctcaggctcctgaaggcgaattccctgaaacacgcgaaaaaatgagcggtatccgtaaagcgatcgcgaaagcaatggtgaactctaagcatactgcaccgcacgtaactcttatggatgaagttgacgtaacaaatcttgttgctcaccgcaaacagttcaaacaagttgctgctgatcaaggcatcaagctgacttatctgccttacgtcgtcaaagcattaacatccgctttgaaaaaattccctgttttaaacacatctattgatgataaaacagatgaagtgatccaaaaacattacttcaacatcggaattgcagcggataccgaaaaaggcctgcttgtgccggtagtgaaaaatgccgaccgtaaagccgttttcgaaatctctgatgaaatcaacagccttgctacaaaagcgcgtgaaggcaagcttgcacctgcggaaatgaaaggcgcttcttgcacgatcacaaatatcggttctgccggaggccaatggttcacaccggttatcaaccatccagaggttgcgattctcggtatcggccgtattgctgaaaaagcaatcgtccgtgacggtgaaattgtagctgctcctgtcttagctctttctctcagctttgaccaccgtatgattgacggagcaactgcacaaaatgcgttaaaccacatcaagcgtttactgaacgatccacaacttattttaatggaggcgtaatgttatggtagtaggagatttccctattgaaacagatactcttgtgattggtgcgggacccggcggctatgtagctgccatccgcgctgctcagcttggacaaaaagtaacagtcgttgaaaaagcaactcttggaggcgtttgtctgaacgtcggctgtattccttcaaaagcgctcatcaatgcaggccatcgttacgagaatgcaaaacattcagatgacatggggatcactgctgagaacgtaacggttgactttacaaaagtccaagaatggaaagcttctgttgtaaataagcttaccggcggtgttgcaggtcttttaaaaggaaataaagtggatgttataaaaggggaagcttatttcgtagacagcaactctgtccgtgtaatggatgagaactctgcgcaaacatacacatttaaaaacgcaatcattgctaccggttctcgccctatcgaattgccaaacttcaaatatagcgaacgcgttctgaactctacaggcgcacttgcgcttaaagaaattccgaaaaagctcgttgttatcggcggcggatatatcggtactgagcttggaacagcgtatgcgaacttcggaactgaattggttattttagaaggcggagatgaaattcttcctggcttcgaaaaacaaatgagttctctcgttacccgcagactgaagaaaaaaggcaacgttgaaatccatacaagcgccatggctaaaggcgttgaggaaagacctgacggcgtaacagttacattcgaagtaaaaggcgaagaaaaaacggttgatgctgattacgtattaatcactgtcggacgccgtccgaacactgatgagctcggccttgagcaagtcggtatcgaaatgactgaccgcggtgtcattaaaacagacaagcagtgccgcacaaacgtaccgaacatttacgcaatcggtgacatcattgacggacctccgttggctcacaaagcgtcttacgaaggtaaaatcgctgcggaagctatttcaggagagccggctgaaatcgattacctcggtattccggcggttgtattctctgagcctgaactggcttctgtcggttacactgaagcacaggcgaaagaagaaggcattgaagtcgttgcagctaagttcccgtttgcagcaaacggacgtgcgctgtctcttaacgaaactgacggcttcatgaagctgatcactcgtaaagaagacggtcttgtaatcggtgcgcaaattgccggcgcaagcgcttctgacatgatttctgaattgagcctggcgatcgaaggcggaatgactgctgaagatatcgcaatgacaattcacgctcacccgacattgggcgaaatcactatggaagctgccgaagtagcaatcggaagcccgatccatatcgtgaaataataatgtaacaaagaaacagcccccgtttgtaaaagcgggggctgtttttattgtgcaagcacatgctgcataggtttgatgatatcctcttttttctttacggatccctcaatcttcatgaccacatgccgatgattgatcaccatcagcgcagggaacgtgttgatttcctcttcccatccctttctgttgtcataaaccttcatttgatcgacatgatggggatatttcttttctaaatcaagaatcgcatcgtaataaggcacttctttatctatatgattttcatcggaaaaaaacaagatttgagtgtgatgaatgctgtcgatccggttttttgtgaatggactgacagtagaaaccgaacagcttgacagaacgaacagcatcaaaaaaaagggaatcaccgtacggtagcgcatctatcttactcctctgttttatataagatattggttcatccatttataaggactatatcaagtgtatcacgagaggtgaaaaacctaaggcttgttactgaattgttatataattgaaaccgtttttaatgaagaaataatacgtgtgacaacttgcgcagccgatgtgtaaaaaaggcacattgtttttcgtgagagcgctgttttttcgttatactgggagcaaaaccatatcaggagggattgtcatgtataaagccgctgcagccgtcatatgtatgtgcttactcgccggctgccaatcaaatgaaaagatgcaaacaaacaaaccccattctcaagccgcggccaatcatgccaaacgggaaaaccaccatacaaaagaggaaaaacagaaaaaacagaaggcggagccccgttactatatcaatccgaaaagcttttctgtggaaaaaatggatgaacagaaagagaaaaaaccgatcgcattggtaacgatcgatgacgcgcctgatcagcatgccgctgagattgcggacaaactgcacgatctcaatgcgtcagcgatcttttttgtaaacggacattttttgaaaaaagatgaaaataagaaagcgcttaagcatattcatgagttaggttttatgatcggaaatcatacaatgactcatcaaaacttaaaagatctttccgaacaaaaacaacgggaagaaatcattggcgtcaataaagcggttgaaaaggtaataggagagaaacccgcatttttcagggcgcctttcggaagcaatacggactacagtgacagacttataaaaaaagaaggtatggtgaaaatgaactggaccttcgggtatgattgggatcagaaatatcaatccaaaaaagcgcttaccgatatcacactgaacagtccttatctgcgggacggggccaacatattgatgcatgaccggaaatggacggcggaagccatgccggacattgtaaaaggattgcgtcataaaggatatactgtgattgaccctcgagctataaaaagaccgtaaaaaataaatgtgttatacaatttatcagttgacatattaaatgtgacataataatataataacaacaagtgaaaattaagcgttttcaaattctgagaaatggggaatgacagatgggtacaattgtttgccaagactgtaacgaagcgattcattactttgaggatgagaaggtcacgacgttatacggaacatgctgcggacaatgccagtgtcatcttgaagaagagtaaaaagcgtaaaaaggcccgaaacgatttcgtttcgggcttctttatgtttattggatggctttttgctctttgatgactctgatcatttcaagcgttgcatcttcgggaccctgcacaggaaggccggcgtccaagtttttaaaaatgtagctgatattttcttcagtaatgatctcacccggaataaagatcggaattcccggcgggtacaccatgacaaactctgcgatgatccgtcctgcggattcttttaacggaatgacttccgtatttgcgtaaaacgcgtctcttggcgtcatcgctagcagaggaatttcaggaagcagaacttcggtttgctgatgagcatagtcattgtcggaagcctgctttgaaatgtctgtaagcgcgcttacaagacggtcggcatctcccgctctgtcgccgggggtgaaaatacataaaatattatacaaatcggacagctcgacttcgatattatatgattcgcggagccatttttcaacgtcatgacccgtcagtccgaggtttttgaccgaaatgattaatttagtcggatcataactgaatgcagctttagaccctgtgatttcttcgccgacacagcggatgccttcaatttgattgaggcgtttccgtgtctgatccgccagcagaatcgtatcttcaagaaggtcgcggccttctgtagcgaggcgttttcttgcgacatcaagtgaagcgagaagcagataggatgttgacgttgtcgtcagcatgcttaaaatcgactgtactctttctttggaaacaagaccttctctcacatttaaaatggagctctgcgtcagggagcctcccaatttgtgcacgctagtagctgccatatcagcgcccgcctgcatggcggacagaggaagcttatcatgaaaatgaatatgcacgccgtgcgcttcatcgacaagcacaggcacatcgaaagaatgcgcgagctttacaatgctgctcaagtcagctgccacaccgaagtacgtcggatttatgacaagcaggccttttgcgtcagggtgctccgtcaaagcccgctcggcggactcaagcgtaatgccgtgagaaattccgagctcatcgtcaatttccgggtgaataaaaatcggcaccgctccggaaaatacaatggccgacataatggatttatgaacgtttctagggatgatgattttatctccgggtccgcatacggccatgaccatcgtcataatggcgccgctcgtcccttgtacggaaaagaaggtatggtctgcgccgaatgctcgagcggccagatcctgggcttctttaatgatgccctttggcgcatgtaaatcatccaggggttcgatattaattaaatctatgcttaacgcgttttctccgataaattgtctgaattccggatccattcccgcgccttttttatggcccggaatgtggaattggacaggctgtctgtccgcgtgctttttcagtccgctgtacaggggtgtttcatgttgcggcaattgttttcccacctttatcataatacctacggattagtttgtattacattcagttttattacccgttttttaaacgtaaaacaaatgaattatattatgaacttgaaagaaagtaaagaacaatttatgatctatggaagatgcttattttgagcatgattataaaggagtgaagacatttggaatatcaatatccgatgaatgaggactggacgacagaggaggccgtggatgtcattgctttttttcagcaggtggaaaacgcctatgaaaaaggagctgaccgagacagacttctgaatgcgtaccgccgctttaaagaaatcgttcccgggaaagcggaggaaaagaaaatctgcagccaatttgaagctgacagcacctattccccgtatcggactgtgaaacaggcgaaacaatcagatcaagcgattatcaaaatgtagacaaagcgagccggcaatcggcccgctttttatgttatgagactttctgagtcagtgtgtataaaaaggaaagcttcctaaaagcatcttcaatggtttgcaggaattcattgttgttcatgttgatcacgtcttctttttgcagctgaatgccgcacaaaagctctgcttttttcactgtctgcaggcgttcaaataatgttttcagctgctcctgatccatgtcggactgcttgtacgcccctggcttcgtatgatccggcgaccatacaaaatgaccgggaatctgttttgtgatgtcctcctgcttcgcttccagcaatctgccgtattcctcttttatcggagattcataaatgatggcaaaccatacaaacatatgagtgtcccataaaccgatctgaaagtgagggagtttcttatacccgcgtttgctgttggcaaaggcaacccagctgtcagccggcgggttgacagatcttctcgcgtgcttggcgacatgcgggaacatttcatcgcctgtcaatgctgacaatgtcggtgcgaaatgctctcctaacaaggtcagcttcggacggacttgttcttttaacacctccatgcgcggatctaaaccttctattgtaaatgtatcgaagtcttcttttgtaaaacgcatctgagtcatctttttcctccttatcgtaagtattcatattttaccacagccgccgccggccgcaaaaacattgagaacgtttgaaccgagaggattggtggtaaaaaacgaataggtaaacacacaattttaagaatgttgttacagccgaatataagtttccatacgatataagaagtatcattaataaattggaaaaatgggatgcttttttaacaaatgatctctggaaggggcgaaagacaatgaggcaagtggtgaaggaaggattcagggaggaaaaaaataaccgtgtagctgtctggagactagaggttgattatgaattggcaaccctgtatgaggccatgcaaaaagagaatgaagatcaaatcgatctcagcaaaagaaaactggaacgtctcagaaaagaatggattcggcttaacggataaagaatagtaaaaacgaaccgcaggaaatggttcgtttttacgtgagaaggcatttttttcattttccttgctttttcatcgcctttatcagtatgctatagaataagctatacatagaaaagaggtacacggtatgacaaattggacggaaattgatgatatcgcaaaacaatgggtaaaagaagccggaacgagaatcagacaatccatgcaggaaagcttgacgattgaaacaaaatcaaatccgaatgatttagtcacaaatattgataaagagacggagcgctttttcattgaccgtatacagggaacttttcccggacaccggattctcggagaagaagggcagggggataaactccgctcccttgacggaatcgtctggatcattgatccgattgacggaacgatgaattttgtccatcaaaagcggcatttcgcgatctccatcggcatctttgaagacggaaaaggcaaaatcggcttaatttatgatgtgatgcaggacgagctgtatcacgccttcagtggaaaaggggcttatctgaacgacacgccgcttgctcctttaaaagaagcttccattgaagaagccattattgcaatcaatgccacatgggtgacggaaaacagaaggattgacccgagtattttggcgccgctcgtaaaacgggtcagaggaacgcgttcctacggctcggcggcacttgagctcgccagtgttgcggccggccgcattgacgcatacattacgatgaggctcgcgccgtgggattacgctgccggctgcgtgctgctgaacgaagtcgggggcatttacacgaccacagacggcgaaccgtttacgtttttagacaaccacagcgtgcttgcgggcaatccggcaatacataaaattatctttgacgactatttacatgctgacaggtagagattttgaagaagaagatctcgggtttctggagcagctggcggctgcacacccggtgtggaaaaacgaagagttcggaacaaaaaatgcggcggagtttatgcttgcatactccatgtacaatggaacgtggctcgtatgggagattgacggcgctcctgccgccgtcagttttcatttggaatgggcgccttcaaacggaaaaccgtggctcggaaccgtggccgtcgctccggaggcaaaagagaaaggaatcggacgcgcggtcattgaagagattgcgggccggctgagaggggagcataaagcgatgttttcagccgttcccctggacaggcatgaatgggttttgtttttaagccaatgcggctttgaacagcttaagcttgaaaaagacgatcgggaaaagacatatatgatcatggtgaagccattgtgaaatgtttcggatataaaaaagagaccggatttctccggtctcttttcttgtttacaagccgaccgcattccaggccgcttctacgcttgcagcgtcttgagagccgtaaaggtcccgcgctgattgaatcaaagctgcttttgcatctttaaagtttgatgacggagtgagatataccgttagtgcgcgatagtaaatctgctccgcttttttcacgccgatttttgtaatcgtgttgtaagcggctttgttcggaattccgctgtttgtatgcacgccgccgtagtcgccggcatcagtgttcggaaggttttggtaatttttgtaatggtcgggctgtccgtattttgtcggagtggataaactgcggagagccggctggctgaccgtaatatcttcaccgatatcccagtcctcagtatcattgaagtatccgaatacatcagagaaggattcgtttaaagcgcccggctgattttcatagttcaggttggctgtttcctgtgtaacaccgtgtgtcatttcatgggccgttacgtccattgaaccggaaagaggcgagaagaatgagccgtcaccgtcaccgtaaatcatttggtcgccgatccaggccgcgttattgtatttgctgccgtaatgaacggaagatacgattttgccgcctttattgtcgtaactgttgcgtttaaacgtctgatagaaataatcgtacactttgccgagattgtaatgcgcatcaacggcagcgcgctgagaagaagttgtgaactggttggtagtgcttgatacgagcgtgcccggcaggttatactgtcggttttgcagatcgtacgtaataatttgcgttccggtaggtttagaaagatcgcgcattacatatttgccgctttcagaagaaatatttaatgagaccgtttttcctttaagagtcgtacctgttccggttgcagcggcatgctccactttgttttgctttttcaggactttccctgtctccgcatcaacggttacttcccagttagctggttccggttcgatgtagcggatggttacatcataggcgaggcggtatttaccgtcttttgtggccgctgctttcagctcggctttgtttttgtttgcaacgttgccgttagagacggcttcaggtgatttgccgattgctttaaaagcatgatccagcgcctgatttgcagataattttttgctgtttgccgttttggcagaagcatcgttgtttaattcaccgttaatcgcatagacattgttggatttatcgacgtgaataatgacttgcgagtctttcacaggcacaccgttaacgacaggcacataacggaagtgcttgtagccgagatcatcggtcgtgtggtcaatcagcttcagtctctcagaagggttgcctttgaagactttgccgttttgtttcaagtattgcttgattgctttgtcactgactgaaggcaactcagactgcaccaaagaatgcttcggcacaaagttcgtcaggttttctttaagctgaggattctcagcggcctgaacacccggaagactgatagttaaactcataaaggaagcggcgacagcaacagacaatttcttacctaaacccacaataaatccccctttttgaaaataatgaaaacttatattgttataataaaccagcattctctcattctgcaatataaaactagactccgctgatgaattgatagaatcgtcccggaaaggcttccggcggccagcatcgggggataagccgagaggcacgtgttgaatcagacatgagtcgaatgatgcgatttattctgaaaaaaatgacaaatgaagtcgggaaaaatgataggggaaaaatgttccaatctgtaaaactttttttatagccgtttgtctaaacaggtgaggccttaataaacgaaaaggattgtttcagatgtcagagattttcagtcattttattcagcatttcgacaggtatttcattttaagcagacagagcgtgttgatcattcagtggtcagccgtctgccttgctgttttatatgcgctgacttttcatccgaaaatcagccgtgagagagtttggttttattcaggaattctgctcagggccgtattattagcgggcataacagttgaattggttcatcaggtgcagagtacttactttagcgcgcactatttgatatcggaagaaagagagcttcttccgatcgttcatctcttaatgtatgggtatgtgctgctcaccgcgtttcactatatgctcatgccgcgggagcagaggggaaagggcatgttttatacgtttgatctcactgtggtggcactgcccgtcattcagctgatcttcagctttttcgctttctggaatatcagtcccgatgcgatggcgggggaggatatagtttcgatgctatgttttattacggttgttttacttctgctgatttctatgaatgttttattctttaaaatgtattggaaaccgagacctgtttttatcggagtgttttatgttggagtcatcgggctgttggtgtgggtgctcgctgcgccctcggcaggtgtaacaaaagattacggcagacttctcccatttacggtgtatttaacgatggccggttttctgatgacccatcatttatttgatcggtcagacaggatcagacagcggacgaaaagctttcttgcggcggcaacggccgctggttttattgtctttttgaatccggtatacaatgcgggcgatgcagcttttgcggtttcaaagccgatagctgaagattctgttgataatgtgggtgaacatatcacttcagaccaagcggaacggatccttacatcattttttccggctgagaatccgatttatttaacagaaaccaatcaggacctccattacttttaccgttttaaaacggaagattacgaagcggaagtggacgaggtttcccaattgattacaaattatcaatatttcaaaaaaccgaaaggccgcacttttacagaagaggaataccggaaaaagtcgctggatttcttgtcggcacacggccgaaaaataaaaacacaaggcattcagacaacagtgagaaaagaaaacggacagtttgtcgtggagattgcgccgaaaacacaagggacgaaacacgaagattcgggcacagtattttactgggaaaaagacaccattatgggtttttcagaagacccgtctatttatcagcttgagtcactgccgcaggtgcatatgacggaaaaagacatagtgaaagcatcaaaagccgcctttcgtacgcttcaaatgcctgatcagacatttgaaatcacaaatacggatataaacagcctgatcggcagcagtttgaccgtaactgtgaataacggaacggagctgatatttgatgcagtatccggacgtcttatgaaaatcagagtctcacctgacagcaccgttttaacaaaaacagaacttcagaagaagcttttttcattgctggacgcggatacttcaaagcttagacaaattgataaatcggaaggcaatctcgtttttgaaaactctgaaggcacattcgtttatatgctccgaaatgaagaaggcatgaaagaggcctcattctacggacaggtaagtgccaaaacattcccgcatacatacagagacggacaaacagcattcaaaaaagtggcggcagcttataacggcatcatttacaaaaagcgggtgaagcctgtcatagcggtgaaagacggcgtaacatataacgcatggctcgtcattattcagccgttcggttcaaatcgtcatgacgcatatgtagtgaacgcggatacttacgaggcggtgaacctttatgaacaataaagaaaaaaaggctgtcttcttcgatttatacgacctatataaggagggggaactcgaaggcggcacgctccagtggatgaaagaacatgagcttttattcggagctgaggcggaaaacagagaagggcagtatgaacatggtttgaatgcgccgtccggcgatatccgccagattaaatacatgaaatgcctgacgtatggattgtacggattcttcattgtgctctcaatctggatgacagtgtggttttacttttaaatgaaaaacaagatgtcaattgaacagctgtaccgtgaacattatcaagatattatgtattacctttacagacgcacacaacatgctgagaccgctaaagacctcgctcaggatacatttatgaaagcatttaacgggcttgagtcgtttaagggccattcgtctatcagaacgtggctctatgcaattgcccatcataccttcatcaattggtacagacgtgatagaaaatatcaattttcagatatcaccctgaatgaagggcttcagcaaacaacatatgaactgccggagcattacgtcgcccggacagacactcagaatgcgctgaccgggcagattcagcgtctgaaaagcgatcagcagactgttttaattttaagggaatttcaagagctgtcttacgaagagattgctgatgttttggactggagtctttcgaaggtgaagagcaccctgtacagggcgagaatgcagctgaaacagcacttggcggaaaaaaggaaggacggacagatatgacttgctgtttagtgagagatttactccctttatatattgaaggcgattgtgaaacagaaacggagcggtttatttcccgccatcttgaatcatgcggtaagtgcgggagtttatatcatatgatgaaggagccgtttgacctcggcagccctgagatgaaggcgccagcctgttatgcagaagaagaaaggcggtttaaggaacggtattacggaaagctgctgataaaagcagcctgtttgttcggcgctgtatttcttatcatgctggtccttaaactgcttatttaaaaaaacgcccggctgaatgaccgggcgttttaatccgtttactcagccggatgaaaggctgtataaatgccttcaagcaattcctggggcagtgaattaaagaatcccgcacacagctttgcttctttttttcctgctcctgctttttcagcaagttcctgatcaaatgtatacacaccgtcttcttcaatcagcgcagattgaaggatatgaagactttgggaaaaagcggtgaacagctgatcaacgataagggcctctttttccgtaaagccgagctccaccgctttttctttattaaatgtatattcgccgtccgttttctcaatacattgggaaagtacggttaaaaattcggttgaactgtcccacagcttttgaatgatctgggcttgttcttgatctaatcccaattcaaccgctttttcaccgtcaaaataatagacaccgtcttttttgtaaatcgattggctgatgatgtcaatgagttttgccgcgtcttccggtgttttctctgcggaagcctgcaggacatgcggttcatttgcctgaatcgtttttgcgccggcagaatcaagcggactgaatgcaagcaaggcggctgaggcggttgcggcggcagttacagcggttttcttcaaaaaagatgttttcatttcgttctctccttgtcatgtgtatttgcttacagccacaagtataaaaagacaatgatggaattgaaataggaggtatggtattttctgcataacgatgccggactatttcagactgcatattctgagggaatctgctgatgtaactagaatgggagctgtcatttccggcttcctgactaggcggcgggggagataagccttacatctcagcctgttttgaggatgtaaaaaagcctgaatctttgattcaggcttcattagatattttctttccatgtttacggaattttgcaaagggtcatgcttttaatcaagcagtccctgttcgcgcatttttttctttacggtgaaaccgcttcccatcatggcgataacgagaacaatgcttccgatgatgccccatgcgcttttctcagcgattgatacgccgatcagcatcatgctgaagactgctgcgaatgcaaataataataagagccaattcaattttttcatatttccatcccctttaacgtcatactttcagtttacagaaaaacgtaacgcttttaaagaggatgtgtggtataatatgaaagttatctaatttttttaggagatgaaaatgtgaaacttcgaaacgatcttcgcaacatcgcgattattgcccacgttgaccatgggaaaacgactttggtagaccaattgcttcaccaagccggaacattccgtgccaacgaaaatattgccgaacgcgcaatggattcaaacgatcttgaacgtgaacgcggtattacaattcttgcgaaaaatactgcgattaactataaagatacacgcattaatattttggacactccgggacacgccgacttcggcggagaggtagaacggattatgaaaatggttgacggcgttctgttagtcgttgacgcatatgaaggctgcatgccgcaaacccgtttcgtactgaaaaaagcccttgagcagaacttaaatccggttgtcgtcgtaaacaaaatcgaccgtgatttcgcccgcccggaagaagtcattgatgaagtgcttgatttgttcatcgagcttgacgcaaacgaacaacagcttgagttccctgtcgtctacgcttctgcgattaacggaacggcaagtctggatccgaaaaagcaggacgaaaatatggaatcactgtatgaaacgattcttgaacatgtccctgccccggtagataacgccgaagagcctcttcaattccaagtggcgctgcttgattacaatgattatgtcggccgtatcggtatcggacgcgttttccgcggcacgatgaaagtgggtcagcaggtttcattgatgaaacttgacggaacggtaaaatcattccgcgtaacgaaaatcttcggtttccaaggattgaaacgcgtggaaattgaagaagcgagagcgggagacctcgttgccgtttcgggcatggaagacatcaatgtcggtgaaacggtttgtccggctgaccaccatgagccgctgccggttctgcgcattgatgagcctacgctccaaatgacatttgtcgtaaacaacagcccgtttgcaggccgtgaaggcaaatatgtcacagcccgcaaaattgaagagcgtctgaacgcgcagcttcaaacagacgtcagtcttcgtgtcgaaccgactgcatcacctgacgcatgggttgtttcaggacgcggtgagcttcacctgtccattttaattgaaaacatgcgccgtgaaggctatgagcttcaagtgtctaaacctgaagttatcattaaggaaatcgacggcgtaagctgcgagcctgttgagcgcgtgcagattgacgtgcctgaagagcataccggttctgttatggaatcaatgggtgcgagaaaaggcgaaatgcttgatatgattaataacggaaacggccaggtccgcctgatctttaccgtaccttcacgcggactcatcggctattctactgagtttctgtcactgacacgcggtttcggtatcctgaaccacacgtttgacagctatcagccgatgcaaaaaggccaagtcggaggccgacgtcagggtgtgctcgtttccatggaaaacggaaaagcgacatcttacggaattcaaggtattgaagaccgcggcgtcatcttcgttgagcccggaacagaagtatatgaaggcatgattgtcggcgaacataaccgtgacaatgaccttgtcgtcaatgtcagcaaaatgaaacagcagacaaacgtccgttccgctacgaaggatcaaacgactacgattaagaaagcgcgcattatgtcgcttgaagaatcactcgagtacttaaacgaagatgaatactgtgaagtaacgccggaatccatccgtttaagaaagaaaatcctgaataaaaacgaacgtgaaaaagcggcgaaaaagaaaaaaacagcaggaatgtcttaatcacttgcagaatttgaaaaggtagaacccgaacggaaaaggggagggggatccttttgaatgaagtaagtgaacggctgtcgttctttgcggctctttaccaagtggatgagcatccgctgtcgggaatgtggctgttatacggaacgatcgtcgtgctttcggtgattgtatttaaactcggctttgccaaacggctgccggtgttgaaggctgcggcagtttatctctttctcgtgctcggctgcaccgtactgacttttttcggtgtgtttctgccggtcggagaagggcttgttgtcgccgccttgattttgatcgtttacaaaatccgtctgcaccagtccaaaaaaagccagtcagctaaaccgcaataaaaaaatgaccttgccttccggcgggtcatttttttattcggtttattttttcagtttatcttttttcgctttttgtccgggatgaaaggaaaagtgtccggtattcagccgcgcctccgttttgactttgattcggtcatggcattcccggcacatatatgtatgaatcggacgattgcggaggcgtttggctgtcagtgtttcatcatcaatttgttcgattttgtcgcaaatggaacattttactctcattgatttttcacctctttcactatgacaagcattataacatggatgcccctcctgccaaagggaaagaaagcagcgcccttcctttggagcgggcgctgctttttaccggcggtttttcatatgatgatccgattgatcgttctgttcgttttgcagcttgttctggtctctttggttcagctgatcatcattcgattgagtcggtgattctttttcattgtcggtcacatcattcgggacttccggcatgacacggccgacgatggcggcaagttcgtccaaaatgcctgaaacggggcggccggccttaatgtcgctgcccatgcctctcagacgggaaaccgtatcaggatcagccacgacaacggcattggcgccgtaaggatcgttttttaacgcctgggcaaccgtgtatttaatgctctccactttgcttctttctaaattgtcatccacatcgattccgacaacggagtatcttccgagtacaaccgcggttgcatctgaaatgccggggattttttcggttacctcgacaagatgcttagcgatgtctgtccggccgggattttcagctgtctcaggagccgtatttttcacatggatcggttttgcatcgcgctgatcggctgattcgttctgaatattgcggccgcggccgtcctgtacagcagtgcagccggtaaggataaacaaggcttgtatgataatgaaaagaattcgcacgtcagatttcctccttgaatgctttcatttattttattgttgaattaaccttctatctttattcaccaaatcatatattttagcaggcatccccgtttttcgcggaaagagaagcacacgatgggctttgatccttatttcaggaggctgagacttgagtaaaatttatgtgttagatacgaatgtacttttgcaggatcctaacgccattttttcctttgaagaaaacgaagttgtcatccccgccgtcgtgctggaagaggtcgattcaaaaaagcggtatatggacgaggtcgggagaaatgcaaggcacgtatctaagctgatagacgggctcagggcgaaaggaaggctgcacgagaaagttccgcttgaaagcggaggaacgctcagaattgaactgaaccaccggtcatttcaccagctccaagaaatttttatcgaaaaaacgaatgataaccgcattttggcggtggcaaaaaatttaagccttgaggaggaaacgaaagaaaacggccgcctcgtcatcctggtcagcaaagatgtgcttgtcagggtaaaggcggatgccatcgggcttttggcggaggactttttaaacgacagagtcgttgaccatgatgaaatatatagcgggtacaaagatatatttatgaataaagagcggtttgcctcgttttataaagacaaacaaatttcagtcaaggagcttcagcagcatcaggtttatccgaatcaatttgtgctgatgaaagatgaattaggaggatcttcgtctgcggtcggcatgacagataagaaaggcgagaccgtaaaaagactcgttttcgatgatgagcacgtatggggtatcaggccgaagaacgtccagcagacaatggcgcttgaactcctgctgagggaagatatcccgctcgtcaccctgatcggaaaagcgggaacgggaaaaaccttgcttgctctcgcggcagggcttctgcagacggaggatctcggtatttataaaaaactgatcgtcgcgcgtcccatcgtcccggtgggaaaggatatcggatatttgccgggcgaaaaagaggaaaagctcaagccgtggatgcagccgatctttgataatcttgaatttttattcaatgcgaaaaagccgggtgaacttgaagcgattttggcaggaatcggatcgattcaggtggaggcgctgacatacattcggggaagaagcattccggatcagtttattattattgatgaggctcagaatctgacgaggcacgaggtcaaaacgcttttgactcgggtgggagagggcagcaaaattgtcctgatgggcgatccggagcaaatagatcacccatacttagacagtttaaacaacggacttgcttatgtggtagaacggtttaaagaacaaaccgtctccggcagcgtgaagcttgtgaaaggtgagagatccggccttgcacagcttgccgccgatttgttataaaacttcgatttctgtgacgcccgttatcggtttctcaaagtcgccgtccacgtaaaaatggaccggtccgccgtcttgaaggggtttccccgcatcgctgaaatgcgcgattgcgtccatcgccttttcgagcggcacttcggttctttctgattttgaaataaatgcgcacaggacagcgctttctttcggctcggcatttgctaaaacagcgccgagcttcatggcgaagctgccgttcatcagtctttctttttcataacgtttttcgctttttaaagtcggcggcgaaatgcgcccttctctgatcacccgttccggatcaagcgtatgctcctgggtttctgcagagccgtccggatgaacgggctgatttttttcaaacggaaacttgcggtcatcgaaaatccagacactcggatcaattgtaatcgggtatgtaacattgccttttacttgaataacgctcatggtgaagcccccctttacttaaagtataaaagttttcgcatgaattgtcactttgcgtcgcaaattagatgtatacaacggcagcgaagtgaggatgatcgacatggtatgccggcattaccaagagctggacgcattagttcaagaagcgaaaaaaagaaccgaagaaggcaaagtggcagactatattccggctctggctgaatctgaacaagacagcctttcggtcacgatttatcatgcggaaaatacatgtctgacggcaggagacgccgatcggacatttacgctgcagagcatttcgaaagtgctttctctggcgctcgtactgatggattacggaaaggaaaaggtgttcagctgcgtgggtcaggagccgaccggcgacccatttaattccatgattaagcttgaaacagtaaatccgggcaagcctttaaatccgatgattaatgcgggagctctcgtcgttacgggtttcattaaagggcattcgccgaaagaccgcctggattacctgctcggattcatcagaagacttgcgaataatcaggacattacatattgcagacatgtcgcggaatcggaattcagttcatccatgattaatcgggccatgtgttattacatgaagcagtatgacatttttgaaggcgatgtagaagaggtcatggatctgtatacaaaacagtgcgcgattaagatgagcagtctggacttagccaaaatcggctgcgtattcgcccttgacggcaagcatccggaaaccggggagcaggtcattaaaaaagatgtggcgagaatctgcaagacgtttatggtgacatgcggcatgtacaatgcgagcggggaattcgcgattaaggtcggcattcccgctaaaagcggcgtttcgggagggatcatgggcatttcgccgtacaacttcggaatcggtatattcggcccggcgcttgatgaaaaaggcaacagcatcgcgggtgtgaagcttttggaaatcatgtctgagaaatacaggctgagtattttttgaaacattttttatcataacatctgcttaaatcctcttgcaatttcatctgataccctttatgataaatagaagaattaggtactcgcctggggaacggagggatacttttggcttcagagattatagttgaccatcagcagaaagcattcgagctgttgaagttagatgctgagaagattttgaagctgatccgagtacaaatggataacttaacgatgcctcaatgtcctctttatgaagaggtcttggatactcagatgttcggactgtcgagggaaatcgattttgctgtccgcctgggattagttgacgaaaacgacggcaaagagctgctggacagacttgaaagagaactgtctgctttgcatgacgcgtttacaggaaaataaatgatcaaactcaaactattcaacggtttgggtttttttataaccgtaaaccgtttttttgcatcttcttttcgtaagacggtctcttaatctgcatttcatccgaaaaactataaagaaactgcgtaaaatgtttatgaattatagtaaaatataatacgcaataggtattaaacgtaagctttaagcaggaaagaggatgttatgtttaaaagaatgttaaaatcttacgattattcattgatatgcgctatcattctgctgtgcagtttcggattggtaatggtatacagctcaagcatgattaccgccgttatgcgttacggcgtgagcagcgactatttctttaaacggcagctgttcgccgtcatcgcggggtttgtgctgtttatcatcgcggccgtttttccgtacaaagtgttcgcccatcaaaagattcagaaattcatactgcttgcgtcagtggctgcgctttgcgcgctgtttgttttcggacatgttgccggaaacgcgcaaagctggtttaaaatcggcggaatggccattcagccgggggaatttgtcaagctgaccctgatactgtaccttgccgcggtatacgcaaagaaacaaagctatatcgatcagcttttgacgggggttgcgccgccggtgatcgtcaccgtagtcatttgtgcgcttatcgccattcagcctgacttcggaacggcgatgattatcggcctgatcgcgttttgcgtcattatgtgttcgggattcagcggaaggaccctgctcaggctggttctcatggcgggaatcgtattgctccttgtcagcccgatcatctacctgaaatgggacgatattttgacacccgggcgtatgagccggtttgaaagccttgaaaatccatttaaatacgccagcacatcaggcctgcagattataaattcgtattatgcgatcggctcaggcggttttttcggtctcggtcttggagaaagcattcaaaaatacggttatctgcctgaatcgcatacagactttattatggcggttatttcagaggagctcggcattttcggcgtcctgtttgtcattgtgctgctggcttttgtcgtgttaaaaggtttttatattgcgagaaaatgtgaagatccgttcggaagccttttggcaatcgggatatccagcatgattgcgattcagacctttatcaatctcggcggtgtcagcggtttaattccgatcacaggtgttccgctgccgtttatcagctacggagggtcatcaatgtttttgttattaacgagcgccggtatattggtgaatgtcagcatgcatgtcaagtactcagaaaagaagaaaaagagggagcccgttccgtctaagggggtaaaaagacggcagacggaaaaaactgtgtatctctaaaaaacaagtgtatacacaggacggatattcctttattataaactacatatttattaggccaagggggagaaaagtttgtcacaacaatccatccaaaaagtgttagtagcaaacaggggagaaattgcgatccggattttccgggcgtgcacagaattgaacatcagaacggtagccgtttattcaaaagaagattcgggctcctatcatcgctataaagcggatgaagcttatctagtgggagaaggcaaaaaaccgattgacgcgtatcttgatattgaagggattattgagatcgcaaaaagaaacggcgtagatgccattcatccgggctacggatttctctctgaaaatatccgatttgcgagacgctgtgaagaagagggcatcgtatttatcggaccgacgtcagcgcatttggatatgttcggagataaggtaaaggcgagggagcaggcagaaaaagccggcatccccgttattccggggagtgacggaccggctgaaacattaaaagatgtcgaacaattcgcaaaagtccacggatttccgtttattattaaagcatcgctcggaggcggaggccgcggaatgagaatcgtccgaagcgaaagcgaattgaaagaatcgtttgagcgggccaaatcagaagcgaaagccgcattcggaaacgatgaagtgtatgttgaaaaactgatcgaaaatcctaagcatattgaagttcaggtgatcggagataatgaaggcaatgtcgtccatctgtatgagcgggactgttccgttcagagacgccatcaaaaggtcattgaggtggcgccgagtgtatctttgcagcctgaattaagggacgaaatctgtgaagcggctgtggcgcttgcgaaaaatgtcggctatatcaacgcagggaccgtggaatttctcgtagcgggcggtgaattttactttattgaagtgaacccgcgcgtgcaggtggagcatacgattacggaaatgataacgggggttgatatcgttcagacgcaaatcctcgtcgcgcagggccacggactgcacagccgtgccgtcaatatccctgagcagaaagacatttttacaaacgggtatgcgatacaatcacgtgtgaccactgaagatccgctgaatgactttatgcctgacacgggtaaaattatggcttaccgctcaggcggcggcttcggcgtccgccttgatacgggaaacagcttccagggcgccgtcatcacgccttattatgattcactgcttgtcaagctgtcgacatgggcgctgacgtttgaacaggcatcagcgaaaatggtccgcaacctgcaggaattcaggatcaggggcattaagaccaatattccgtttcttgaaaacgtggcaaagcatgaaaaattcctgacgggccaatacgacacatcgtttatcgacacaacgcctgagctgtttgttttcccaaaacagaaggaccgcggaacaaaaatgctttcctatatcggcaatgtcacggtgaacggttttccgggaatcgggaaaaaagaaaaacctgcatttgataagcctcagaccgttacgttaggtatcggggaaaagccggcaagcggtacgaaacagatccttgatgaaagaggcgctgaggggcttgcagactgggtgaaagagcaaaaatccgtgctcctgaccgatacaacgttcagggatgcccatcagtccctgcttgcaacccggatcagatccaatgatttgaaaaaaatcgcgaatcctacggctgccctgtggcctgaactgttcagccttgaaatgtggggaggcgcgacatttgatgtagcgtaccgtttcttaaaagaagacccttggaagcgccttgaagatcttcgcaaggaagtgccgaacacattgttccagatgctgcttcgttcatcaaatgccgtcggttatacaaactatccggacaatgtcatccaaaaatttgtccggcagtcagcggagtcaggtattgacgtattccggatctttgacagcctgaactgggtaaaagggatgacgctggccatcgatgccgtccgtgaaaccggaaaagtggcggaggctgcgatttgttacacgggagatattcttgataagacccggacgaaatatgatttgcaatattatctttctatggcgaaagagcttgaggcgtctggtgcgcacattctcggcattaaagacatggctggtcttttgaaacctcaagccgcatacgaacttgtctcagcgctgaaggaaacgattgatattcccgttcatcttcacacgcatgatacgagcggcaatggcgtctttctctatgccaaagctgttgaagcgggtgtggacatcgtggatgtcgccgtcagctcaatggcgggtctgacttcacagccgagcgcaagcggattttatcatgcccttgaaggaaacagccgccgtcctgaaatggatgtccggcaggtggaaagactgtcgcaatactgggaatccgtccgtcagtattacagtgaatttgaaagcgggatgaagtctccgcatactgagatttataatcatgaaatgccgggcggccagtacagcaatctgcagcagcaggcaaaaggagtcggcctcggtgatcgctggaatgaggtgaaagacatgtacagcgtcgtcaaccgcatgttcggcgacgtcgtgaaagtaacaccttcttccaaagtcgtcggagatatggcgctttacatggtgcaaaacaatttaacagaacaagatgtttatgataaaggcgaaacgcttgattttccggattcagtcgttgagctctttaaagggcagatcggccagccgcacggcggatttccggaaaaactgcaaaagctcgttctgaaagggcagacgccgatcacggtaagaccgggtgagctgcttgaaccggtatcttttgaaggcattaaagaagaatggaaagaaacacatcatatggaattgagtgatcaggacgcaatcgcgtatgctctttatccgaaggtgtttactgaatatgttaaaacggcggaacgcttcggtgatatttccgtattagacacaccgactttcttctacggcatgacactcggtgaagaaatcgaagtggaaatcgagcgcggaaaaacgctgatcgtgaagcttgtatctatcggtgaaccgcagccagatgcgacacgtgtcgtttatttcgaattgaacggccagccgcgcgaggtggtcattaaagatgaaagcattaaatcgtccgtacaggaaaaattaaaagcagatcggacaaacccaagccacattgcggcatccatgccgggaaccgtcattaaattgttaacggaaaccggggcaaaggtgaataaaggcgatcatctgatgattaatgaagcgatgaaaatggagacgacggtacaggcgccgttctccgggacgatacagcagattcatgtgaaaaacggtgaaccgattcagacaggcgatttactgatcgaaattgaaaaagcgtaaaaaatgaacataaaaaaacctgatccgccctcgtgtgcgatcaggttttttagatgtaaaaaggccgaagctctaatgcttcggccttttcatgtgcctcagatgtaccgctgttttgattcatagcggaagcgggcgattaataataagaaatagcataagacgccgaacaggccggcaataaagagcgaatgggcaagtgcaaagccggtggccatttctgaataaacaaccatgattccggagagcgcctgtaatacaacaaaggcaagagccgctatccagcccccaagaatctgtttttgatctttgtaggagcgcaccgcatgcgcaaaagcgacaagaatccatacgaacagaagcagcgctgccgttctgtggcccatctgcacccattcctgaaaatgggacggaagcccgtgattcagcctgctgcaaagcggaacgtcagggcaggcaaggcttgatttcgtatggcgcacataagcccccgtataaacgacgatatacgtgtaaatcgaaaggccgatcatatgaaactgcatttttctgccgattctgagcggcttgacgagctttttgtctgatttatcagcttcaaatatgagcagcgtcaaaatcagaacagaagcgaaagaaatcagcgatatgccgaaatgaagcgccataacgagcgcatttgatccgaaaacaaccgctaatgcgccgagaagcgcctgtaaaaataaaaagataatggacataatggcgagaaaggttgtttcacggaaaacaggcgtgacttttctccatgcccaaaaagcgagactcagcacgagaacgattgagacaccgcttgcgagtctgtggctccattcaatgatagaagcggcgttaagctccgggaaaaaccggccgtggcaaagcggccactgccttccgcatccgagacccgatcctgtctttgtgacaagagcgccgccgatcagcacgacgagcataacgaatgtcgtcagcacgccgagcgctttcaaagctttattcattttacattcaccttcttaacaaactggacaaaatgatatacgtaccaagtgtaagcgaatatgtgttttgtggcaattctcaattctgtttgttcacaaaaatataatagaatcaggacttcttagataatggggttgattattccagatgggtctgatagaaataaagtaaccgctttattatgaaaccggcggatttggtaaaattcataaaaagttcacaaataaattcctgtttctcgtttaatatttaagaggatgtttttttacaggtgattatcttgtatgatagagttgcaggtcttaaaaaacctgctttaggtttgtaagggaggtttacgttatggctaattccagaattttaaacgatacagctatagacggacagattgaagagacgacggcatggaaggatttcctttcgcttatcaaaataggaatcgtcaattcgaatttaattacgacttttaccggcatgtggcttgcgttacatatatccggtctgagttttttaggcaatttaaacaccgtgcttcttacattaataggatcttctttgatcatcgccggttcttgtgcggttaacaactattacgaccgtgatatcgatcatttaatggaacgcacgaaagtaagaccgacggtaaccggaaagattcagccgaatcaagcgctgtggtcaggaattttactcattgctttaggacttatcatgcttttgatgaccaccgtgatggcagcagtcatcggttttatcggcgtgtttacgtacgttgttctttatacaatgtggacgaaacgccgttatacgattaatacggttgtcggaagtgtatcaggcgccgtgccgccgttaatcggctggacagcggttgaagggcacatcggtgttgtcgcgtgggttttattcatgattttattcatctggcagattccgcactttttagcgcttgcgattaagaagacggaagattacagagcagcgaatattccgatgcttccggtagtgcacggctttgaagtgacgaaaagacagattatcgtctgggtcgcatgcctgctgccgcttccgtttttcctcggcagtctcggtcttccgatcgtcattctcggcactttgctgaatgtcggatggcttgttctcggactgatgggattccgcatgaaaaacatcatgaagtgggcaactcttatgtttgtctattcgcttaattacatgaccatttattttgtagcgatggtggtcttcacgctgttttaattaaataatgagcttgtttgatcgccaaaacaaacaatgacaactagtaaacgccgccttgaccttttgtttaatcaggcggctttgcttttatacatagatggaattttaagtaaaaaatctcatattttaagaaatgaggaaaagaagtatttcggctggaagcagatttactgcttgtgcatctcgtactgattgaaaaaaggggttgggtgaaatgttaaagcgttggcgtcttttatcattattagccttagtgccgcttttattgagcggctgtggaaaaccgtttctgtccacactcaagcctgccggcgaagtggctgataaacaatatgatctgacggtgctcagcacacttatcatggttgtcgtcgttgcggtcgtagcagttattttcttttacgtcattgtgagattcagacggtcgcgtgtaggggaagacacgataccgaaacaggtggaggggaaccgttttttagaaatcacctggaccgttattccgatcctgcttctgattattcttgtcattccggttgtcatcgacacattggcactggcggatacgtcgccgatggataagaaaaaccgtaaagcagaggatgcgctcgtgattaatgtaagggcgaatttatactggtgggaattcgagtatcctgattacgggtttgtgacaagtcaggagctgatcgttcccacagatgaacgcgtctatttcaagctgaagtcctcagatgtgaaacactctttctggattccgtcagccggggggaaaatcgatacgaatacggataatgacaatactttctttctgaccttcgattctaaacgcagcaaagaagcgggagaatatttcttcgggaaatgcgcagagctgtgcggaccttcacatgcgctgatggatttcaaagtgaaaccgctgccgtcaaaagaatttaaacaatggacgaaagcgatgaaaaattataagcatacaacagattccggtttagccgcgcaaggagaagagctgtttaaggaaaaaaactgcctgagctgtcatgcggttgagcccaatgataaacgggctgaagcggcaagaacggctccgaacctcgctaccttcggtgaacgggtcaaagtggccggcattaaggatgcgaataaagagaatataaaagcctggctgaaaaatccggacagcattaaaccgggcaataaaatgacaggcacttatccgaagctctcggacgctgaaacggatgcgctgtatgaatatttaaaagggctgaaagcggagaacaagtgaggacagggagatatcaggggggaggtcgcaaatgatgaatacgcttacagggcagcaaagaaaaagctctttgctttgggattatttgacgacggttgaccataagaaaatcgcgattttatatatgatcgccgggggatttttcttcgtcgtcggcggacttgaggccatgcttatcaggattcagctcttgaggccggggaacgattttgtgggtgcgcagcagtttaatgaaattatgacgatgcacggcacgacaatgatcttcctggcggcgatgccgctgttattcgggctgatgaacgcggttgtgccgcttcagatcggggcgcgtgacgtatcgttcccatttttgaatgcgctcggattttggctgtttttcttcggaggcatctttttgaatctgagctggtttttagggggcgctcctgatgcaggctggacgtcgtacgcgtcgcttgcgctgaattcgaaagggcacggcatagactttttcgtgctcggcctgcaaatatcaggcttaggtacgctgattgcggggatcaattttctcgccacgattattaatatgagggcgccgggtttgacgtatatgagactgccgctgtttacgtggacgacatttgtggcgtcggcactcattttattcgcatttcctccgctcaccgtcggtttggcgctgatgatgctggatcgtttgttcggaacgaatttctttaatcctgaattgggcggcaatacgataatctgggagcatctgttttggattttcgggcatccggaagtatacattttaattcttcccgcctttgggattttttcagaaattattcccgtatttgcgaggaaacgtctgtttggttattcgtctatggtctttgcgatcgtgctgatcggctttctcgggttcatggtttgggttcaccacatgtttacgacgggactcggaccgatcgctaatgcgatatttgcggttgcgacgatggcgatcgcggtgcctacgggcattaaaattttcaactggcttttgaccatctggggagggaatgtcaaattcacgacgcctatgctgtatgccgtcgcctttattccttctttcgtactcggaggagtcacgggtgtcatgctggcggccgcagcagcagattatcagttccatgatacgtattttgtcgtagcgcatttccactatgtcattatcggcggtgtcgtgttcggcatcctggcgggcgtgcatttctggtggccgaaaatgttcgggaaggtgcttcatgaaacgatggggaaaatttcgttcgtcttattttttatcgggtttcatcttaccttcttcattcagcatttcctcggcttgatgggaatgccgcggcgcgtttacacatatctgcccggccaggggcttgataccggcaacctgatcagttcaatcggcgcgttttttatggcgggcgcggctgttttactcgtcgtcaatattatttatacctcaataaaagggaaatacgtcgggaacgacccgtggctggacggtcgtacgcttgaatgggcggtctcttcgccgccgccggaatataattttaaacagcttccgtttgtccggggacttgacccgctgtggattgaaaagcaggccggaaatgaaggtatggcgcctgcagagcctgtagaggacattcatatgccgaacggctccatcatgccgtttatcatatctttcgggctgtttgtcgcagcatttgggtttttataccactccgattattcatgggggcttccggttatcttcatagggctcggcatcacattctttaccatgctgcttcgctctgtggtcgatgattacggctatcatattcacaaagaagatctgccgaatgatgataaaggggtgaaggcgtaatgcagctgcaggaaaaaatgacggctgaaacctttccggcttctcctgaaaaagcaacgctggaggggaaaaataagtttttgggattttggctgtttctcggcggggaaacggttctgttcgcctcgctatttgcaacattccttgctttacgggaatctaaagccggagggccgtcaacggctgagatgtttgagctgccgatcgtatttatcgcgacgatgcttcttttaacgagcagcttaacgagtgtgtatgcgatgtatcatatgaaaaatttctcctttaaaaaaatgcaggtgtggcttttggttaccgttttattgggagcaggatttttaggggtagaaatctatgaatttatgcattacactcacgaattcggctttaccattacaagctctgcgctcggctcagcgttttacacgctcgtcggcacacacggagcacatgtggcgtttgggctgttgtggatcagcgcgcttatgatccggaatgcaaaaagagggctcagcctttataatgcgccgaaatattatgtggccagcttatattggcattttatcgatgtcgtgtgggtctttatctttaccgttgtatatttgatggggatggtgggataacgatggacgataacaaaaacagagggactgtcagtacggatctcgaatatcggaaaaagaaaaatgccgaggagatgaaatatcaggtcatatccttcggtttaatgatcggccttacgcttgtcgcgtttttgacggtggctgcagacggcattgccggatggtttacgatgccgtttctgatcctgcttgcggtcatccaggtcatctttcagctgttttactttatgcatatgagccagaaggggcatgaagcgccgtcattatttctgtattcgggaatatttgtcgcgtttatcaccgtgcttgcatttgtcacgattatttggtggtaatcggggcggcggggagtgagagatttgattaatttggaaatgttcgggtttcgcgcaatgtggagcccgtatctgttttgcataactgccgtgataacaggagtttacttttactggtgcagccggcataaaggacgtgtggccgctaaggagaaggtgctgtttgtgctttccgcgctatttttttacgcggctgcgggaagtccgattgatttattgggccatgtgatgttcagcgcccatatggcgcagatggcggttctgtttttagtcgtaccgccgctgttgatttccggaattcccggctgggcatggaagaaactgatcttccgtcctgtcgtaaagccgctgtttttgttcttttcaatgccgcttatcgcattagtgctgtttaacggtattttttcactgtatcacatcccgtttatatttgatttcgtcaaaacggattcgctgtatcacacgctgatgaacggactcatctttgtaacggcgttttttatgtggtggccgcttgtgcataaggtggacggtctgccccgtctcagcggtttaatgaagctggggtatattatggcagacgggattctgttaacgccggcctgcgcgctcattatgttcagcggggcgcccatgtatgccacgtatacagatccggcggcttgggccgaagcaatgaagctttgcgttcctttagatttgctggaggagatccctttatccgggccggagatgtttaacacgctacctcctctggaagatcagcagcttggggcagtactgatgaaaatcattcaagaggcggtctacggaacatatttggctgtcatcttttttcagtgggtcagaacggaacgggaaaaagatacgctgtcagagccgccgtatatcgagcataccgtctcataaaaaaaagtacagcagaaataggaactgaccccataatatgagacaaacaaaaaacaccttcaagtttgaaaacggaccgttgttatccgaaataaaacttggaggtgtttttctatggggacaagagtgagttatccggttgaagtcaaacagaaggctgtaggaatgagattggcgggcgtgcctatgaaagagatcatgcaggaattgaatatcaaaaataagactcaggttcagacatgggttagatggcataaggctggggatacccaccgattcgaacagcctgttggaaagcaatatacttatggaaagggtccggagtattcttctgaattagagaaactccaggcagagaatcgttatctgagacaacagaatgaagtgttaaaaaagtacaacgaattggaaaggaagctgatagggaaacgacaatcaaactggtagaagaattgcgcaagacgatgacggtacaggacatctgtgtccatttagatatttcacgcacttcatattatagatggagaaagaatctgactaagagtaatcctaagatgcgactggagaaacaaatcggcacgttgtgccgagaacacaagtatcgatatggatatcgaaaaatcacagccatactaaaaaagagaataagtattaatcataaatctgttcaacgtattatgcagaaaaatcaatggcagtgtcgggttaagatgaaaaagcgtaaaaaaagtgggcagccatattctgtggtcgataatatattggatcggaactttcagtctgatcgccctcttgaaaaactggtaacggacatcacatatttgccttatggacagaaacaattgtacctttccagtatattggatttatacaatggagaagtgattgcttttacgattggagataagcaggacacagactttgtcttagacacacttgatcagctgccaacacttcctgaaaactgcgtgttacatagtgaccaaggttctgtttatacatcttatgagtatcagaaagctgttaaaacaaaaggcattaccatgagcatgtcccgcaaagggacacccgctgataatgcctccatcgaatcgtttcattcctcactaaagtctgaaacgttctatcttaacagcattgatcgaactacgaccgccatcgtagaacgcactgccatagaatacattcattattataacaatattcgtattcaaacgaaactaaacagccaatcgccgatacaatatcggcaattggctgtatgaaggtgttttgatccctgtctcaaaaacgggggtcagtcccaatatgctgtacttttttattacatttgcactgtttttaatgattcttctaattcaagcagtaaagctttgctttcagcgacgacatgttccggaaattcttcagcgctgccgtattctacgccgtgcggataataatgctttcctaaaagaggggccttcagctgaatcacggcccggctgccgccgacatcgccctcttttgccgttccttgaatccgcagataaaatgtcccctcaggtactgaaaactttttgtcgtaagtcactctttcataatcccattgtccagccagaatgagccctttaccttccatcagatcattcaagcggctgagctccgctgttaccccttcaagaccgctgttttcaaacttcaaaccttccccctccttttaaaaatgccctttcctgacaatcatagtatgaaagcgttacactttcaatgattcatacggtgaaagtatgcaaaaagaaaaatttgacgacaatagtagcagaaaaaaggaggaattccgcaatgacaaagatcaataagctcatgacgtcagacttgcaatattgtacagtattagataatgtatatgaagctgcggtgaagatgaaagacgcggatgtcggcgccattccgatagtggatgaagacggagcgacccttgtcgggatcgtgacagacagagatctcgtattacggggaattgcttccaaaaagccgaactctcaaaaaataaccgacgcaatgacagagcgggttatcagtgcagaagaagacgcctctgtggaggaggtgctccatttgatggctgaacatcagctcagaagaatccccgtcacaaaggataaaaaactggtcggcattgttacgctcggcgatctttcgttggccgagcaatcaaatgagcaagcaggccgggtgctgtctgacatttctgaagacggcggtccggaggggtttatccattaaacataaatcacggacgatgcaaataggctgtactgtataagagtaaacaaaaacagaacggtttgaacatatgggggtgagaggttgaaaaatatcgcaagggctctcgttatccttttgcttatttacggagcgtatgttctgtttatacaatatggatcggctcctcagaaaaagacggatcaggaggagcctcaggtctccaatgaagaagagagcggaaaacggctgaaaatgccgtcatccggactgctttctctcatggggaaatctgccgccgatgtgaaaaagaaacttggggaaccgtcccggaaagatccttctgcctacgattacgagtggtgggtgtacaaccaggggaaagaccaatacgtacaagtcggtattttgaatgataaagccgtgactttatacgcttcgggaagcggcatcaacgcaaaaccgtttaagatcggcgaatcgacgggcgaagtttttaaaacgacgcaggtttctccttttgtcaatgtgactgacaagggaaacacgtatcggttcgagttttctgaagaagatatcaatacccgtcccaccgtcaagataggcggaatgtatgttcagctgtacatggacaaatttgacgggaatctgtcaagcatcagggcatttgatgcggaaacacttgtgaaacaaaggccgtatgaagtcatgtacagaggaaagctgacagaacccgagcctgtttctgataaaaaatggaacgacattgaacgagcgagtgagcagcagattctcgatattacaaatgtcatccgcgtgaaacacggacttgcaaggctgaaatgggacgaaggcgccgcaaaagtggcattcggtcacagcaaggacatgaaggataacaagtatttctctcacgtctcaaagaaatacgggactctgaaggaccgcttggaaaaaggcgatgtgaaataccgggaggccggtgaaaatattgcctacaactatgtggacggtcctgcagccgtggagggctggctgaacagcgaaggccacagaaaggcgctgttaagcccggattatacgcacctcggtgtcggcgtggaccagaagtattatacgcaaaacttcattaagccttggcagtaaaaaaccgcagaggggcgcgtcccccgcggtttttttatgttttttcgcgagtggcgctcctgctgaaaaaaatatatctgctttttttcgcaatttaggcgaacattaaggcgcatgaaccgatacattatagcaggcaaaacttttcggagggggtgagaattgtggcgaatcagcaatcacggcaatcaatcgatgattttaaacaattcgtaaaaaagcatcccaaactgatccaaaatgttcgcaaggaacaaagaagctggcaggaagtctatgaaaattgggttcttctgggcgaggatgatccgatatgggacccttttaaagacgaggctgttcagccttcttccgacgcggaaaccaaacaggaaccagctgaaaaaaacgatttcgtttcaaaaatggtcactgccgtcaaaaagatggatatcaaccaaatgaatgagcagatcaataaaatgagccaatccatttcatcattgcaaagccttttaagccaattttcggggagcagcacgaagcagccccggcaaggctccggacaacatcctttttcgttcaggaaggattaaagaaggggatcgtgtatgcgaaaagaggttcaggaattcatatccgcagatgaggaacggaaacggtttatacggcagcgtcccgtctggtaccgcagacttgcgagaaaaccggacgatctcaattcctttcagcttgacatgatgaatttttatgaaaagacgataccgcatcgggtaagccaattctcaaacgggattcaaatggcgcagatgatgatgcagatggttcacgccatgcgttcacaggattaaaaagcgtttaaacgccgcattttccaattgggtggtttcatggtaaactagcaactggaggtgcgtatttatgtatgcaacaattgagtccgtcaagcttcaaagtgaagcggagcagcttgccggcatgattctgcagtctgagacggctgaaaattaccgcgattgttacaagcgtctccgtgaagatgaagaggcagggcggatcattcgttcttttatgagcgttaaagagcagtatgaggatgtgcagcgctttggcaaataccatcctgattatagagagatttcccgcaaaatgagagaaatgaagcgggaactggatttaaacgataaggtggccgaatttaaaaaagcggagacggagcttcagtcgctgcttgacgagatcagcattgaactcggaacggccgtctcggagcatgtaaaagttccgacggggaatccttattttgacggcctgtcatcctgcggcggcgggtgcggttccggcggcggctgcggatgcaaagtttcctgacgagacggccgtctcgtcttttacataaaatgaacagaaagtcaggcgggtgatcatgatggaaaataagcgccaaggcataatcgtatatctgcattccttaaaacacagcaaaatgctgagaaaattcggcaacgttcattatgtttcaaagcggctgaaatacgttgtgctgtattgcgatatggatctaatcgaaaaaacaatggaaaagatttcttcttattcttatgtgaagaaggtagagccttcttataaaccttttttaaagctggaatttgaatcaaagcttgataaagcgaaagagtacgattataaagtcggtatataaaaaaaatccccgcagatacctgcggggtccttctattccttaacaagttaaggagaaggaaaagggagaggagaaaccggaggaagaacttatggggaaacgtaagtcttctccgcggttggcaacaacatcattcattgatgctgttacacgtagtcttgacaggaatgtgaatatgtatacacgtttttcacgttcattgtttgaaagaatgctttatgataagatagggattgttttgatacataacggctcagccgatgagaaacatcaaagttttcagaaaaagtggtgtgaataatgagagtaatttccggttcaagaaaaggacgagccttaaaggctgtgccgggcacatcaacaaggccgacgacggataaagtaaaagagtctatttttaatatgatcggcccgtattttgacggaggaacggggctggatttatttgcggggagcggcggtctcgggattgaagcgctgtcgcgcggatttgaccgctgtatctttgtggatcgtgatttcaaagccatccaaacggtaaaagcgaatatcaaagcgcttgatctgctgtcttcagcggaagtataccgcaatgatgcagagcgggccttctatgccgcggcgaaacgggaaaaaggttttgacggaattttcttagatcctccgtataaggaacaaaagctgaaagcgcttatcgaaatgattgatgagcagaacatgctgaatgaagacggttttgtcgtagccgagcatgataaagccgttgcgcttcctgaagccgtcggcgcgctttctgtaacaagaagggaaatttacgggcttacaggagtgacgatataccgaaatagggggtaatgatgtggcaagtatagctgtatgtcccggaagttttgatcccgttacctacggacatctggacattatcagacggggggcaaacgtgtttgagcaggtgtgcgtatgcgtgctcaataattcttctaagcagccgctgtttacagttgaggaacgatgtgagctgttaagagaagtgacaaaagacataccgaatgttacggtcgagacgtcacagggactgttaatcgactatgcgaaaaaaaagcgggcgaaggcgattatcagggggctcagagccgtttctgacttcgaatatgagatgcaggggacttccgtcaaccgcgtgctcgacgaatcaatagaaactttttttatgatgacgaacaatcagtactcttttttaagttcaagcatcgtaaaagaagtagcaaaatataacgggcctgtttcagagtttgttcctccggaagttgaacaggcgctgaagcagaaatataaaggatgagagcgctgactggcgtctcatcctttttttgtccgtgctgacagcctgtaacaataaatcaatgcgtatacggcgagagctgtcagcgtgatggcgggaccggtttcaacaagtgtattccatccgctgacggcagcagataccgcgtcctgatcgcggaaagggaggaatacagactggtaaggttcgtccaatgcaaggtaaagcggcttccacagtaagagaataaagagtgcggcataaatgccctgaaggatacgcgccgcgaaaaacggtttaaagcggatatctgtttccgataaaatgccggctacctgggcctgtacggaaaggccgctgaacccgagaataaaactcacaatcatggctttcggcagcaaggcggcatcagcttcactgaccagcttgctcccaagtgtaatttcaaacattccgctgataagagggatgtccagatttgccggaagatgaaaaagcgaaagcagcgcgtttgtaaatacagaaagcacatccatgacttgtacgattgataataaccggctgaaaaccgaaaacaatataataaaaccgcccaccatcagcaaggtttgtacagaagaggtgacggcgtcgcccaaaatttttccgagcggccgcttttccgaaagccgcgccttgtggagggccagaaatgcttccttcagagaagggagagcgatcgtctttttaccggtatacgccgcttcttctttccgtccgtatgaacgcatcgtcaggccgacggcgatgtttccgagatagtgagccgatgccagcagaatgccgagagacgcgttatgaaaaaagccgactgccacagcagcgaatataaataacggattggatgaattggtaaaagagacgaggcgttcagcctctactctggagatttgtttatcctggcgcagccgtgcagtcagcttcgcgccggccggattgcctgaagccatgcccatagccagtacaaatccgccgacccccggcactctgaaaatgggacgcataaagggttcgagtaaaaggccgacaaacttgacaatgccgaatccgattaaaagctcagatagaataaaaaacggaagcaatgaaggaaaaactacctcccaccacatggaaagaccggttttggaggcttcgaatgaggcctgagggtgtgaaataaccgtcgccgtcaaaaaaatgaaaaacaatgaaatcaaaaatgtatgaaacttagacaaattcattcttacctccccgatgctaaaattgcacactgacatttatatcatgataaaatatagaacagaccttaaaggcggccgggcaagtacctatttgtcatcctgtactaatatacgagcataggggttcaatttagaccatagaattcatgtataggatgtctattagggggttcgtcgcgttggccaaacctacaatcgggttagcgttaggttcgggaggggcaagaggcatcgctcatctcggagtgttatccagtttacataagcatcagattccaattgatatgattgccggcagcagcatgggagcattagtcggaagcttttatgcggccgggcatgacgtggccacgatgaaaaaagtcgctaaagcatttaagcggcggctgtacgcggattatacgatgccgaggctcggatttttaaaaggagaccgcatcaggcagctcgttcatgcctatacgtacggcaagccgatagaagaactgcggatcccgctcggcatcgtggcctgcgatcttcagaccggcgaaaagcttgtttttacgaaaggttcagtatccgaagccgtccgcgcgagcatcagcataccgggcgttttcgtcccgcaaaaaatgaacggacgtatgttagtcgacggcgcggtggtcgacagaataccggtttccgccgtaaaagatatgggtgctgatatcgtcatcgcctctgacgtatcccgggtgaaaaaaacggaaaaggcggcacatatttttgatgtaatcatgcaaagtatggatatactgcaaaatgaattggtccgtcaccagaccattgccgcagacgtcatgatccgcccttctcttgaatcattcagctcaagttcttttgccaacattgatcatatgatcacagcgggcgaagaagccgcagaccggatgatcggccggattaaacaagaaatagagaactgggagggctaactcatatgaaagcaaaacattttcgctgggtgtttatcatcctgatcttattaatcgctgttacatttattaagcttccgtattacatcacacagccgggagaagcatcagagctgagaccgctgattaaggtggacggaggctatcctgaaaaaggaagcctttccttgatgactgtcaaagtaggccccgccaatccgtatacatatctttgggcgaaagtgcatccttacgaagaaatcgtccctgatgaaagcataaaagaagagggcgaatcggactcggattatatgaagcgccagctgcaaatgatgaaaagctcccaagaaaacgcggtcattgccgcttatcaaaaagccgggaaacaggtgaaatactcatttaacggcatttatgccagctcagtcgtctctgacatgccggcaaaaggaaaaatagaggtcggtgataaaattatcagcgcggacgggaaaacatacgaatccgctgaaaagctgattgattatatcagcagcaaaaaagcgggggaaaaagtaacgtttcacattgaacgggacacgaaagaaaagaccgttgacattgtgctgaaatcattcccggacgacccgaaaagagcgggaatcggtgtcgcattatatacggaccggaacgtgaaagtgaagccggatcttcatttcagcattgaaaacatcggcgggccttctgcgggtctcatgatgtctttagaaatttacaaccagctgacaaaacctgacgaaacaaaaggctataatatagccgggacggggacaatcgacgtggacggcaaagtcggaccgatcggcggaatcgatcagaaagtcgtcgccgcagacaaagcgggaaaagatattttctttgcgccgaatcaaaacggagctgaaaattctgattacaaaaatgcggtaaaaacggcgaaagcaatcaagtccgatatgaagatcgtccctgtcgacaccatgcaggacgcacttgactatttggatcagctgaaagtaaaaagcacctgatacagacaggtgctttttttacgcattcaaaaaacgcttttcgtcttcatcatagcggatcggcgcttgtgaaaattcctgtttctcaaacaatgtgcgttcaggttcgtttatcggcaggctgtaaacccgtcccgccagtatgtccagatccagagcgggatgagagaaagaagagagcttgctgacgagaggtgcggtaagctcttttttctttgccgacaggtacgcctgtccttttttcgtcattccgagaagacggatataaggagcgcttgaaggctttaagagccgatgcatgtcttcttttttcgtccgtgtcagaatgtgcgtgttcatccgctgcagcctcgtccacgtgtatcgttttgttttcaatcgttccatcatttcgcgataggatcgggcttgtctgatggtgcgaagaattctgtgctcaaggccttcttccacttcatagattcggctcaattcttcagcggaaagagtgctgaggctgtatttcacatatgaaaaatagtcttccgtgctgtgccatatgccgtatgaatttctgtatgcctccagctcacgcgcagacgcttccgggagaaagctccttgcggccgccgttcctttttctatcagcgctttccggatgcttgttgcgctggctatccggctgttatctccgggaagctcggcgtcatgatactgggaagcgattctggctgtcgtataaggcttcatggcggaaccggaagcgtgtatcgctctaacgtagtgaaaaccgagaatattgttcggcttggacaaatcgagcatgtcccgtcctttgaatatgtgtgaaaaagcttttgaagcggcggccggatagctgagaccctttttcagctcctctttcagaatcaggctgcagtcatcttcctttcgggtgaacgcttcagacgcttcaataaagggttcgatccgcccgttttcgctgccgaaaaacaagctgctgcatcctaaatgatgaagaagcgaaacgctgccgcgcgcgaataattccgctttttgtacggcatatatataagggagctcaatgacgatatccacgccgttttccagcgccatttttgtccgggcccactttgagacggcggccggttccccgcgctgcaaaaaagggccgctcatcaccgccgccgcgacgctgctgtccgttttgatttttgcttgttccgcatgatagcggtgtccgttatgaaagggattatattcaacaaccaggccgactgctttcatatttgtcccgcctttcttgctatgttttgcttcgtgtggtacatttgcaaatgaagtgcatattttagtccgtttcgtttagtgtatgcatagcctatccggctgtcaacgattgcatgacggcggcattatgctgtaaagaaaaaatattgacaaaaacattctgaaaagctataatcatgtttgttgctttcctgaggtgatacaaatgaaatggacgatttatcagcttcatcaaatggcgaaaaagagctttgaatttgatgaaacagttgagttaaatgagctgacaaaattgaattctgacatccgccgcatttctcccgtccgggtgaagggccgcgcggagattgaatccaagcaggtttcgtttgactttacgatttcaggcgaaatggttttgccgtgctcaagaactttagttgatgtgccgtatccatttacaatcgcgacaaaagaactgtttagatttcataattcggatgatatagaagatgaggacgttcatattgctgaagacgatatcgtcgacttaactccgatcgtaaaagaagagattcttttagaaattcctatgcaagtcttttgtgaaactgaacaaaaagaaggagccgctccccaagtggggaaggattggcaagtgatttctgaggaagacaagaaaaatcaaatcgaccccagacttgcggatctgaaaaagctcttaacacaagatgatgaatcttaactctttaaggaggtgggaataatggctgtaccttttagaagaacttctaaaatgaaaaaaagattgcgccgtacacatttcaaactaaatgtacctggtatgacagaatgcccgtcatgcggagagatgaaattgtctcaccgtgtatgtaaagcatgcggatcatacaacggcaaagacataaatgttaaaagcaattaatgtatgaagaaaagcgcgggaatctcggttcctgcgcttttctttttttttgcccctccggccaacttccgccgaaaaaattgtgagccccagtagtctatctaatctatcagcggcatatgtatgaggtaaatgagcaaatatggagggagatacgattgacgataacgagacaagacgcgtggacgcaagatgaagatttgctgctggccgaagtggtgctcaggcatattcgggaaggcgggacccagctttccgcttttgaagaagtcggcagagcgctgacgagaacggctgccgcctgcgggttcagatggaattcttatgtcagaaaacaatatcagtcagggatagaactggcgaaaaaacagcggaaggaattaagaaagcagatcggggtgcattccgccaatctgccgggaaccgtcaaacagcctccgatccgcagggcggaaggagaaaaagagctgtctattgatgatgtcattttgtttctgcagcaatttaaagagtcgccagccgcagcggatgtgcgtcatgaaaaagaaaaactcacagaacagctgaccgcgctgcaaaaagaagtcgaggatctgcgtgaggaaaatgaaagcttgagaaacaagctggagatgacggaagaagattataaagcgttaattgacattatggacagagcgagaaggatggtcaattcaaaagaagacgacagaaaatcggcgcagagcctgtaaaatgaaccggcctgggggcggcggcccggccggttttttattatgccgtttctccggatgtcatttcaccgtccatatcgggatgccagatataaggattttctcctttatcacgcgccatatcatatttaacgggctcaaaattcatcttatcccagaaatctgctgatttcatgcgtgaatttgtcctgatcggcattctgaaggattttgcaaaatcaacaagcgcttttccgtatccgttgttttgatagcccggaagaacctcaagcttccaaagttccaaaaagtcctgacgctgatcaaaatacggattcgtgcctccgttgacctgatataaactcattctcgccactagtttatccccgaagtaaatcccgtaaaaaggcgaggtgctgtcattttcaatgatattatcctgaagatcttcaagcatcgacagctcctgcatcccgtattccttaaaccttttaaattcttcgagtgtcttaaagttgatgagcagtcgctctattttcaacacaaactccccctttgttgtgttctaccattattgtaaacgctttaattgaaaattccaactataatatgcttacccgtctttttgctcaaaacgaaattgaagtaatttgcggcggcttctgctatgataatatggaaaaatgcagatatagggtgtgacagtgtgaaaatcggaattatcggcggcggagcggtaggccttttatgtgcttactacttatcgtcccgccatcaggtaacggtcattacgcggcggacggagcaggctgatgcgattaactcaggcggtatacggcttttgaaagacggaatagaatgtacggcggcatgcagagcgcaaacaggcctcacttccggattcgacctcttaatcgcagccgttaaacagcaccagctaagtgctgtgttgcgggatcttgagacgataaaagggacgaatgtgctgtttttgcaaaacggcatgggacacatacacgacattaaagattggcatacggatcattcgctttatgtcggcactgttgagcacggagcaaaaaagatatcagatcatgccgttgaacatacgggagcgggagccgtaagatggagtgtattcagcgcatcccggccggaaacgctcaaaagcatcttttccggcatgcaccgggattttcccgtatatgatgaaaacgactggtatcggctgttaacgggaaaactgatcataaatgtatgcatcaacccgttaactgcattgctgcgcgtgaaaaacggagagctgttaagaaatgacgcttacaaaaaatatatgagaaacgtgtttgaagaagcggagacaatacttggcctcgccgatagagaaaaagcgtggaacaaagtttgcgaagtttgcagactgacggaaaaaaatcattcttccatgctcgtcgatatcatggcaggcaggcggacagaggccgatgcgattatcggctaccttgtaaaagaagcggaaagccgcggattgccggccgttcatctcccgtttttacaccgcagcataaaagcgttagaaagaaactgaaacaaagtcttttgaggttttccggtaacatgctatactcatttcggaaacctaactatttattggagaaaggaagttccagacagatgcagctaactgaactttccatcaaaagtcaaaataagtttgttcagcactatatagatggagaaaacatgtcttcattttttgattatgatattcattcagaggacgtatggcaaaagcggcttcatgacctgtcttcgcggccgtttgccagagaagaattagcggactatttatcctcctatcacgaaaaatttcactccgccgccatgcaggcctccatcgaaaaactgagagatccaaaaagcgcagcggtagtaggcggccagcaggccggtcttttaacggggcctctttacaccatacataaaattatctccattatcgtacttgccagacagcaggaagaggcgttgcagattcctgtcgttccgattttctgggtggcgggtgaagatcacgatctggaagaaatcaattttgtgcacacgtcaacagagaataaaggtccggtgaaacagaaactgccgcagtcgtactggaaaaaaacatcggcggctaaaaccgagcttgatcaggaaaaatgcgcggcttggattgatgaagtgttcgctgcttttgaggagacggatcacacaaacgcactccttcaaaacgtgaagcgatgtttacgctcatcagagacattcacggacttttttgaactgttgatcgccgacttgtttcaagaagaaggccttattctgatgaattcgggagatccggggattaaaaagctggaaacgggtatgtttcagcagattttaaaacacaatcatgagcttgccaaagccgtgtcagaccagcagcgttttatgcgggaagccggttatcacccgattattgaatcggacaaagatcaggccaatctgttttacgaacatgagggagagcgtttcttaattgaaaaagaaaacggcgtttttgtcattaaggagcttgacctgaagtggacgaacgacgagcttcatacccatatggaagaaaaaccggaatgtttcagcaataacgttgtgacaaggccgcttatgcaggagtttctcatcccgactctggcgtttatcgcgggaccgggggagatcaattattggggtgagctgaagcgggctttctcattaatgggctttcgcatgacgccggtagtgccgagactgaacattacgcttcttgagcgccatattgaaaagaagctttcagaacggaatatcccgcttcaggaagcgatcgaacacggcaccggacacctgaaagacacttattttgaagagcagattccggaagagttttcttctgtaatggaacaggcgaagtcgcagattgaagccgtccataaacacgcaagggacgaagcgctgaaggtcgattcaagccttgagccgctcttacagaagaatgccgccttcattcaagatcagctcttgtttttagaacggacggtaacgaaaagaattgaagaaaaagaaggttttgtgctgcgtgactatgaaagaatccaaaacagcatcagaccgctcggcgctccgcaggaacggatttggaatgtgatgtattatctgaaccgctacggtccaaaattcttcacaaccttcaaacatctgccattttcttttcaaaaccaacatcagattgtcaaactttgaaataaagttttaaagaaccctgaatagttcagggtttttttttatgtgtaaacagtgtaaaatgaggttgtggagagaagtggcggatagtggtgagtttaggggagaaagtgggggtccttatcatgtttatgggtgaataccggcatactgttgatgcaaagggccgcatgatcgtacccgcaaaattcagagaaggcctcggtgagcagtttgtgctgaccagaggactggaccaatgccttttcggctatccgatgaatgaatggaagctgattgaagaaaagctgaaggctctgccgctcaccaaaaaagacgcccgcgcatttacccgattctttttttccggtgcgaccgaatgcgaactggacaagcagggaagggttaatattgcgtcatctcttctgaattacgcaaaactggaaaaagaatgtgttgtcatcggggtttccaatcgaattgaattgtggagtaaggtaatatgggaacaatacacagaagagcaagaagattcattcgctgaaattgctgaaaacatgattggatttgatatataatggatcttcgtgcatcacaacaacaactgacaattcaattcattcctgataaaggtgggaccgacacaaatgtttcagcataagacagtacttcttcgtgaaaccgtcgacggtttaaatatcaaacctgacggaacctatgtggactgcacccttggcggcgccgggcacagtacatatttattgcagcaattatcggaaaaaggacgcttgatcgcctttgatcaagatgacacggcacttgaaaacgcaaagaaaacattgtccgaatacaaaggacagctcattctggtgaaaagcaactttcgttatttaaaagagtgtttacatgaacacggcattacgagtgtcgacggaattttatttgatttaggagtatcctctccgcagcttgatacaccggaacggggattcagctatcatcatgacgcaccgctggacatgaggatggaccagtcggccgcccttacggcgaaagaagtcgtaaatgaatggcggtatgaggaccttgtgaggattttctttaaatacggagaagaaaaattcagcaagcagatcgcccgaaaaattgaagaggcaagagaaaaatcgcctattcaaacaaccggccaactggtcgatctaataaaggacgcgataccggctccggcaagaagaagcggaggtcatccggccaaacgtgtattccaagccatacgaatcgccgtaaacgacgagcttcaagtatttgaagaggccctcttgcaagcgatagaggtgctgaagccgggcggaagggtgtctgtgatcacttttcactcgctggaagacagaatgtgcaagacgacattcaaggaaaaatcatcacttcccgaactgcctccgggtcttcctgtgataccggaagaatttgaaccggaattaaagctgattacaagaaagcccattacggcatcaaaagaggagcttgaagaaaataaccgcgcccggtcagcgaagctccgcattgcggagaaacgaaaataacgggcagcaaatgacaacattaaaggaggtcatcagcctatgagcaacttagcttaccagcaggaaaaacaacaacggccagtgataagtcccgaaaaaaaggtgattgtcaaaaagagggcttccattacactcggggaaaaggtgctgctcgtcctgtttgccattgccgttctctccacatcaatgtttatcgtatcaaaggcatacgcggcgtaccaatccaatattgaggtgcaaaaactggaggagaaagtatctgagaagaataagcagatcggtgatctcgaaaagacggctgctgacttaagccagccgcagcgcctgatggatatcgccaaaaagcacggtttgaatctgaaagataaaaaagtgaaaaacatacaggaatgataacccatgccgaaaaaaaataagtttatgaacagaggagcagcgatactcagtatttgtttcgctctctttttctttgtcattctcgggagaatggcgtacattcaattaaccggtaaagcaaacggtgtagaacttgcaacaaaagcgaccgagcagcacgaaaaaaagcggacgatagaagcgagccgcggctctattcttgaccggaacggtaaagtgcttgcagaggacacggcgacatataagctcattgccgtgcttgataaaaagatgacgaccgacaagaagcatcctcagcatgtcaaagacaaagagaaaacggcggaaaaactggcgaccgttatcaatcttgataaaagcgagattctggacatcttaaacagggatggcgcgaagcaggtggaattcggttcagccggccgcgatatctcttatgcgaaaaaacaaaagatcgaaaaaatgaatcttccgggtatttctttcttaagagatacgaagcgttactatccgaacggtgtatttttgtcaaatgttctcggctatgccgatgtgaatgaaaaaacaaacgagatacaaggctctttagggcttgaaaaaatactgaacaactatctgacggaacgcgacggatccgtcacttacgaaagtgataaatccggctggaaacttccgaacagcaaagaaaaaatcaccgcacctaaaaacggtgacaatgtatatttaaccattgatcagaaaattcaaacctttttagaagacagcatgacgaaagtagcggaaaaatataaaccgaaaaaaattatggcggctgtcgtagaaccgaaaacaggcaaagtgcttgcgatggggcagcgtccgagttttgacccgaatatcagaaacgtcaccaattattacaacgacttagtgtcgtacgcgtatgaaccgggatcaacgatgaagatctttacgcttgccgcggcgattcaggaaaatgtgttttccacaaacgagaaatataaatcaggaacatataaagtgggaggcggacctgttaaagattggaacgatggcgccggttggggtatgacaagcttccatgacggcctcatgaggtcatcgaatgttgctttcgccaaactggccaacgaaaaactggggtttgaccggtttaatgagtacctgcacaaattcgggctctatcaaaaaacagggattgatctgcccggtgaagtatcaagtaaaattaactacaaatatgattttgacaaagcgtctactgcttacggccaagcatcggcgataacgccgatccagcagcttcaggccgtcacggcgattgccaataacggcaaaatgatgaaaccttacgtcattgatcatattgttgaccccgatacgaaaaaagtcgtcaagcagacaaaacccgagcaggcaggcacgccgatttcagccgatacggcgaaaaaagtccggaatctgctcggagaagtcgtgacgtcagacatcggaacgggaaaaccttataaaattgaaggatttgacgtcgcgggtaaaacgggaaccgcacaaattgccgggacgggcggatatttaagaggaacgagcaactatgtgttttcattcatgggcatggcgccgaaaaatgatcctaagctcgtcatctatgtagccgtgcagcagccgcaattaaaagcggggcaaagcagctctgatcctgtcgcggaaatctttaacccgacgatgaaaaacagccttcactacatgaatatcgaaccgacggaaaaaacagattccggtcaggaagaaacgaaaagccaaaagatgcctgacctgacagataagacggtcaagagcgctgagaaggaagcgaaaaatgaacatctcacaccgattgtcatcggcagcgatgttgccgtaaaagagcagtatccgacagccggagaagatctgatcaccaatcagaaaatcttcttaaaaacagacggaaagatgacgatgccggatatgtccggatggtcgagacgggaagtgcttcaattcagcaaagtatcaggcattcacatcgatgtgagcggtgaaggttacgcttcaagccaaagtgtgaaaaaaggcaaagaactgaaagaaaataccgtgatcaaggtgaaatttaaaaatcctgattaacgggacagagaagtccgcggatgcccgcgggcttcttttttatgcgccgccgttctatgtgtccaagctgaggcataaattgaaacaagcctaaataaggagtggacggtcccttgcgcgtttcaaatgtaacggttcgaaaacgtttattactggttttgctttttggcgtaatcatttttttgatcattgacagcagattaggctatgtccaattcgtgatgggagaaaagctgacttcactggctaaggattcctggagccgaaatttgccgtttgagcctgagcggggagagattcttgaccgaaacggcgtgaagctggctactaataaaagcgcgccgaccgtctttgtcgtaccgcgccagatccaaaatcccatcaaaacgggcaagcttctcgcgtcagttttaaatatgtcggaagagaaggtctacaaacacattactaagaaaacctccatagaaaaaatctcacccgaggggcggaaaatttccaataaaaaagcgaaagaaatcaaagcgctcgacttaaaaggggtttatgtggctgaagacagcatccgccattatccgtacggaagctttttgtcccatgttctcggttttgccggtattgataaccagggccttctcggattggaggcttattatgatgatgacttaaaaggtgtaaagggatccgtgaaattttatacggatgccaaggggaagaaaatgcctgatgaagcggatgattacacccctccgaaagacggacttgatatgaaactgacgattgacgccaaggttcagacgattatagaaagagagctcgacaatgcagcggcgaaatataacccggacggaatgattgcggtcgcaatgaatccgaaaaacggggaagtgctcggcatgtcaagccgtcctgattttgatccggctgactatcaatcggtggatccgtctgtttacaaccggaacctgccggtatggagcacatatgaaccgggttcgacctttaagattattacgcttgcggcggctcttcaagagcaaaaagtaaacttgcaaagagaccacttttatgacaaaggatttgccgaggtcgacggcgcccgcctccgatgctggaaaaagggcggccacggttcgcaatcttatcttgaagtcgttcaaaattcctgcaaccccgggtttgtacagctgggggaacggctcggaaaacaaaagctgtttcaatatattaaggacttcggctttggaaagaaaacaggcattgatctgcaaggggaaggaacggggatcttattcccgcttgacagagtcggcccggtcgaacaggcgacaaccgctttcggacaaggggtttccgtcacgccgattcagcaggtggcagccgtttccgcagcaataaacggcggaacgctttatactccatttatcgccaaagagtgggttgatcccgttacgaaaaaaaccgttaagaaacaatcgccgattgcgaaaaggcaagttatttcccaggaaacgtcaaagcagatcagatatgctttagaaagcgtcgtcgctcagggaacggggcggaatgcctttgtggaaggatatcgcgtcggcggaaaaacaggtaccgcacaaaaggtcaaagacggcaaatatctcgaaaacaaccatatcgtctcctttatcggttttgcgccggctgatgacccgagccttgtcgtgtatgtcgcggttgataatccgaaaggcacgattcaattcgggggaaccgtcgccgcgccgattgtcggaaatatgatgagagacagtctgcctgagctcggcgtgaaaccgcgaaaaaatcaaatcgagaaaaaatatcaatggaacgacacaaaaacaatagaggttccgaatgttgtagggatgtctgtctctgatcttgagtcgctgcttgtcaatttgaatattgactcctcaggaaaaggaagcaaaattgtgaaacaatcacctgcagccggaacgaaagtaaaagaaggctcaaagatccgtgtttacttgagtgaagaatgagtctttttgaggcagccgattgttttcggctgcctcttatcataaagagaaaaaaagaagataacttttaagattaactggatgtatccttttatttacgctaaaatatgaactgtatgtttaaaagccattctgacttttataaacggttatcatgataaaagaatgaatagaatttctgagaggtttgatacaatgaaacttacaaagctgcttacatatttaatggccgaacctgttcaaaatgactttcatgaccctgacataacttcaattgagatggactccagggaagtgagaaaagggagtctttttgtgtgtataaaagggtatacggtagacggacatgattttgcccaaaaagccgcagaaaacggcgcagcggccatcgttgccgagaaagagcttgacgtcgatgttcctgtcattattgtccgccggtcacagcgggcgctcagcgttctttctgacgcgttttacgggcagccgacaaagcagcttcagcttatcggcatcaccggcacaaacggcaaaacatcaacgacgcacatggttgatgagattttcaaaaaagcgggaagacagaccggtttaatcggaacgatgtacattaaaatcggggatgagacattcccggtcaaaaatacaacgcccgaaagcgtcacactgcaaaaaacgttcaagaaaatgaatgatgagcatgttgacacagctattatggaagtgtcttctcacgctctgtcactcggcagggttcacggctgcgattatgatatcgccgtattcacgaacctgacgcaggaccatttagattatcacaagacgatggaagactacagacaggctaaaagcctcctgttttcccagctgggcggctcctttaaccacgaaaagccgaagcgggccgttttaaacgcagatgacaaagccagtgcttattttgaaaaagtgacggcggcgcacatccttacatacggaatcgagaatgatgccgatgtcatggcgaaacaaatcgagatctctgcgcaaggcacaagctttgaactcgttacgccaaaaggaacaaagcagatcacagtttcactcgtcggccgcttcaacgtgtataacgtactggctgcagcggcgacagcgatcgcagcgggactgccgtttgatacgatcacaagcgctcttgaagagctgcaaggtgtcagaggccggtttgaactggtgaatcacaatcagccgtttcctgtggtcgtcgattacgcgcacacgcctgacagtctggaaaacgttctgaatacatgtaaagacatgacagagggaaagcttttcgtcgtcgtcggctgcggcggagaccgggacaaaacgaaacgcccgaaaatggcggaaattgcggtgcggattgccgacgaaccgattttcacttcagataacccgagaagcgaggacccgctggccatattaagagatatggaaagaggggtagaaggcacctactatcacagtatcgcaaaccgcgagcaggctatcttttttgccattgccaacgcgaaaaagggagatgtggttctgattgccgggaaagggcatgaaacctatcagcagatcggcaatgaaacattcgactttgatgacgccgaagtagcgggaagagctattgttgagctgaataaaaagtaaaacaggaaagagtgttagaatgagggaaatgaaaagaattacggggacacaatgtgaatatgataaatacgtatgtcgtttgaacgaaacgggaggagaaaagagcaatgcttgagcaagtgattttatttacaataataatgggatttttaatcagtgttctgatatctccgattcttatcccgtttttaagacgtttaaaattcggccaaagtatcagggaagaggggccgaaatcacatatgaaaaaatcagggacgccgacgatgggcggggtcatgattattgtatccatcgccattacggcgattgtcatgacgcagaaattttcgcatctgagcgcggaaatgtttcttctgctgtttgtcaccatcggatacggcctgctcggctttctggatgactatattaaagtagtaatgaaacggaatctcggattgacgtcgaagcagaaattgatcggccagatcattattgccattgtattttacggagtatatcattattgccatttttcaaccggcatcagggtgccgggcacacatctgtcaatcgatctcggctggggatactttatcctcgttctctttatgcttgtcggaggttcaaatgccgtcaacctgacagacggtctggacggtctcttgtccggtaccgcggctatcgcattcggcgctttcgccatccttgcgtggaaccagtcacaatatgatgttgcgattttctcggttgccgttgtcggcgccgttctcggttttcttgtattcaacgcccatcccgccaaggtatttatgggggataccggttcgcttgcgctcggaggagcgatcgtgaccgttgccattctgacgaagcttgaaattctgctcgtcattatcggcggagtatttgttattgagaccttatctgttatcttacaagtcatcagctttaaaacgacaggaaaacgaatctttaagatgagtccgcttcaccaccattacgaattggtcggatggtctgaatggagagttgtcgtcacattctggactgcgggactgctgcttgccgttttaggaatttacatcgaggtgtggttataagtggaaaacgaactttttttgcaaaaacaaaactttctagtcctcggactggcgaaaagcggatatgcggctgcgtcgattcttcatgaaaaaggcattaacgtcgtcgtgaatgatcaaaaagcctttgaagagaacgaacctgcccaaaggcttgcagaaagaggaattgaagtcatctgcggtgagcatccgacgtcactttttgatcagcatcacattaccattctgatcaaaaatcccggaatcccgtatgaaaatatcatggtggaggaagcgcaaagaagaggcatcccggtctggacggaaatcgagcttgcgtattatatcaccaatgcaaaattcatcggcattacaggttcaaacgggaaaacaacaacgacgaccctgatttatgaaatgctgaaagctgactcgataaaggcgctgatcgcagggaatatcggcactgtcgccagtgaagtggcttatcatgctgacggtgatgaatggatcgtcacagagctttcttcgttccagcttatggggactcatgcgttcagacctgaaatcggcctgattttaaatgtgttcgacgctcatttggattaccatcacagccgtgaaaactatgaaaaagccaagcagaacgtgtatcttcatcagcttgagagtgatacggccatcgtcaatcaaagcgatgaaacagtcgtgcggcttgccgaaagcggaaaagccggcaccgttccgttttcagttcaccaggaactgtcaagcggcgcattcattaaagacggaatgctgatgttcggcgatgaagcgattctgcctgttgatgacatcgtactgctgggcgcgcacaatttagaaaatatattggccgctgtagccgcggcaaaaacggcgggcgcgtctaataaagcgattcagaaggtgctgacaagctttaccggtgtcaaacaccgtctgcagtatgtaactgcgatccagaatcgtagattttataatgacagcaaagcgacgaatattttggccacaagcaaagcgctctccgcgttcaaagcaccggttattctgcttgcaggcggactggaccgcggcaacggttttgacgacctgaaaccgtatatggacaatgtcaaagcggtcctgacgttcggacagacagcgccgaagatagaaaaactgggcaatgagctgggaatacaacatgtcaaacgtgtcgataatgttgaacaagcagtatctgcggcgtttgcgctctcaaatgaaggagacgtcatcctcttgtcacccgcgtgtgcaagctgggatcagttcaaaacatttgaagaacgcggtgacatgtttatagatgccgtgcatatgcttaagtaagggcttgtctctgttcatcggcagccctaaatgacttatgcttggggtgtcgattgctttgactactaaaaaaacagcgcctgatttgttattagttatcattacgttattgcttttaacaataggattaattatggtctacagtgcaagtgcggtatgggcggattataaatttgacgactcgtttttcttcgcgaaacggcagctgctgtttgcggggatcggcgtcattgccatgtttttcattatgaatgtggattattggacatggcgcacatggtcgaaactgcttctgatcatttgtttttttctgcttgtgcttgtgctgattccgggagtcggaatggtgcggaacggttcaagaagctggatcggagtgggagcgttcagcattcagccttcggagtttatgaaactcgcgatgattgcgtttctggctaaatttctttctgaaaaacagaagaatattacgtcattcagacgcggattcgttcccgcgctcggaatcgtgttttctgcatttattattattatgtgccagccagacctgggaacggggacggtaatggtgggcacgtgcatcgtgatgatttttgtttccggtgcgcgaatcgctcattttgcgttcctcggactcatcggtttaagcggatttgcggcacttgttctgtccgctccttatcggattaaacggattacctcttacttaaacccgtgggaggatccgcttggaagcggatttcagatcattcagtcgctctatgccgtaggtccgggcggactgttcggaatggggctgggtcaaagccggcaaaagtttttttacctgccggagccgcaaaccgatttcatttttgctattttatctgaggaactcggctttatcggcggttcgctcatattgctgctgttcagtattttattatggcggggcgtcaggattgccctcggcgcgccggatttatacggaagctttgtcgccatcggtattatttctatgatagctattcaagtcatgattaatatcggcgttgtgacggggctgatcccggtaacaggaattacgctgccgtttttaagctacggaggctcatcactgacgctgatgctcgcagcggtcggcgtgcttttaaatgtcagccgatactcgaggtattgatctgtatcttgcctcatcactcatgatttattcgttatctataaaaaaacagacaacatcaataaccctgtcctaaaaaaacagggttatcgctatgtgattaagggggacatacgaatgcgtattgcagtaagcggaggcggaaccggaggacatatttatccggccctggcctttattaaagaagttcagcgccggcatccggatgtggaatttttgtatatcggaacagagaacggtcttgagaaaaaaattgttgaacgggaaaacatcccgttccgcgccattgaaattacaggtttcaaacgaaaactttcttttgaaaatgtaaaaaccgtcatgcgtttcttaaaaggcgtgaagaaaagcaaatcatatttaaaagagtttaaaccggatgccgttatcggtacaggcggctatgtatgcggtccggtcgtatacgcggcggcaaaaatgggaattccgacgatcattcatgagcaaaacagcctgcccggcatcacaaataagtttctctcgaaatatgttaataaggtggcaatttgctttgaagaggcaaaatcgcattttcctgctgaaaaagttgtgtttacgggaaacccgagagcctctgaagtcgtctcaattaagacaggccgctcattaactgagttcgggctgaaagacaatcaaaaaacggtgctcattttcggcggaagcagaggcgcggctcccattaaccgtgccgttatagatatgcaggaagaattgaaaacgagaccttaccaagtgctttatattaccggggaagtgcattacgagaaggtaacggctgagctgaaaggcggaaaagccgctgataatatggtgacaaaaccgtttttgcaccaaatgccggagtacttacaatcaattgatgtcattgtggccagagccggagcgacgacgattgcggaaatcaccgctctcggcattccgagcgtgcttattccgagcccgtatgtgacagccaatcaccaggaagtcaatgcgaaggcgctcagccagcatgacgctgcaatcgtactgaaggaaaccgagctcaccggagaaaaactgatcgctgcgctggacaaaatcgtcatgaatgaagaaaccttaaaagacatgagtgagcggacaaaatcactcggtgttccggatgcggcagccagactgtacagtatcatggaagacataaaaaaatagagcaaatggaatgcggaggtttatgatggagaacgtaattcaggaattaagagaccgcgaagtcggcaaagtgctggaacaagaaccgctcgcgaaccatacaacgatgaaaatcggcggtccggcggacattttgatcatccccaaccgtgtggaagcggtcaaagatattatggatattgtgaagaaacatgatctgccatggacggttatcggacggggttcaaatctgctcgtgcttgatgaaggcataagaggagttgtcatcaagctgggagcgggtctggatcatttggagattgacggtgatcaggtgacagtcggaggcggctattcggtcgtccggcttgcgacttccatgagtaaaaaaggaatgtccggtctcgaatttgcagcgggcattcccggatcaatcggcggagccgtctatatgaatgccggggcgcacggatctgatatgagtgagattcttgtgaaagcccgtatcttatttgaagacggcacaatcgaatggctgacgaacgaagagatggatttcagctacagaacgtctgttttgcagaaaaaacgccccggcgtctgtctcgaggcagttcttcagcttgagcaaaaggaacgggaagccattacggcgcaaatgcagcagaacaaagattacagaaaaaatacgcagccgtattcgagcccatgcgccggaagcatattcagaaatccgctgccggatcatgccggaaacctcgttgaaaaagcgggattaaaaggacatcagatcggcggagcgaaagtgtccgaaatgcacgggaattttatcgtcaatgccggcggagcgactgccaaggacgttcttgatctgattgaatatgtgaaaaagacaatccgtgagcagtatgatgttgacatgcatacagaagttgaaatcatcggagggaatcgttaaaaggttctctgattacatgagctcatgtgatatacttttaacaaatgtcaaacggcatcacagcatgccgtttgtttttcaatcagacgaatgtcaagctgtttcattcttagtgaggtggacaggcagtgaacccaaatcatgaaagagaaaaaatcgtaaatattgaagagcggattccgaaaatcaaagagcagcggaagcaaaaagcaaaccgccggctgatttcattcattgtgctcttttttatgatggtgctgatcatcgtgtacttgcagatgccgatcagcaaagtgtcttctgtcaccgtttccggaaacgaaaacgtgtctgtaaaagagatcaacgcgctttctgatatacataacggacaaaccgagttctggagtctgaacaagaaaaaaacagaagaaaagattgagcagaataagctggtgaaaaaggcggaactttcaaaagtatttcctaacaaagtcagcattcacattgaagaatacaagacgatcgcgtatctgcagcgacatgatgtatattatgaagtgctcgaaaacggcactgtgctgccgaacgaagtcacgccggatgacgcgggcccgattttggttgactggacaaacgcgaaaaagcgggtcaaaatggcggagcagcttgataagctttccggttcgctaaagcagtcgatttctgaaatctattatacaccggtaaaaatggatcaggaccggatcaggctgtatatgaacgacgggtatgtagttaccgcttctattaaaacgtttgccggccggatgaagacctatccttctatcgtttcccagctggacggcgggaaaaaggggattatccacttagaagtcgctacgtattttgaagaatttaacaaaggtaaatccggcaagaaaaaagaaaatgattaatagttctaaagaactaatttcaaggtgattcaaaagaatctattacaatcagcggggcagccgatataaccgatagcggaatcattatgactatgtttgtttttgcccgggatatggctgccggacaagcggaaaattctcaatgcaatgggcgtgtcttctgcaatgagcattgcatttggaattttcctcctgtttcttcttttttcggatgtttctggcaatatctatagcttttctggaggttcatcttagtgtagactaatggaaagcgggtatatttgcatctggtttgcacagtatggcaccgtgaaaggaaatcttacggtaaggtgggccgtctctaaaaaaaataaaaaaaatacgatataaaagaggatatacatagaatataacgaatagtttcattaaacataaattgtgagaaatcagataaggtgagaaatcagataagaatttgttgatgctgttgtttttgttacacacttgtaaagccacattcattgtattgttgttccgcaaataatagaatagaatttgatcgaaatgtgaggaggtgccatagaatgaacaacaatgaactttacgtcagtcttgacatcggtacgtccaatacaaaagtgatcgtcggagaaatgacagatgattcccttaacattatcggagtgggaaatgtaccgtctgaagggttgaaaaaaggctcaatcgttgatatagatgaaaccgttcattctataagaaaagcgtttgaccaagctgaaagaatggtaggttttccgctgaaaaaagccattgtcggcgttaatggaaattatattcatattcaagatacgaacggcgttgtcgctgtttccagtgaaaacaaagaaattcacgttgaagacgtccgcagggtaatggaagcggcacaggtcgtgtcagttccgcatgagcagctgatcgtagacgtcgttccgaaacagtttatcgttgacggaagagacgaaattaccgatccgaaaaaaatgctcggcgtgcgcctggaagtagaaggcacgctgattaccggctccaaaacgatcttacataatttacttcgctgtgtggagagagcgggcgttgaaattactgatatttgcctgcagccgcttgcggccggttcggcggctttgtcaaaagacgaaaaaaacctcggagtcgccatgattgatatcggcggcggctcgacgacggtggcggtatttgaacaggggcacctgaaggagacagccgtcattccgctcggaggcgaaaacatcacgaaagatgtatcgatcggattgcgcacttccaccgaagaggctgaaagagtaaaaaaacaattcggacatgcattctacgatgaggcttcagaagatgaagtatttgaagtcaccgtcataggaacgaatcaaaagcaatcttttacacagcaggaaattgctaatattattgaagcaagagtggaagagattcttgagattgccgcagccgaaattgagcatatgggaattacagatctgcccggcggctttgtgctgaccggcggacaggccgcaatgcccggagtgctttcattggcacaggaagtgctgaggcacaatgtaagggtcgcaagcccgaattatatcggtgtaagagaccctcagtatatgacgggtgtcggcttgatacaatttgcctgccgaaatgccagaattcagggaagaaaaataggctttcatatgccggaagaagccgtgcaggaaatcgcggtctctcacgaagaagaacatcatcagcggccagaggcgcagcagcgtccaaaagcaaaacaaaaaacacaagccgaacacaacaaaccgagcaaaatgaaaaaactattaagcatgttttgggaatagattgatagtcattcggcagattaggaggatttagcatgttggatttcgaaacaaacatagacggcttagcatcaattaaagtaatcggagtaggaggcggcggtaataacgcggtcaaccgaatgattgaaaatgaagtgcagggtgtagagtacattgcggtaaacacggacgcgcaagctcttaacctgtcaaaagcggaagtgaaaatgcagatcggggaaaagctgacccgcggtctcggagcgggagcgaatccggaagtcggcaaaaaagccgctgaagaaagtaaggaacaaatcgaagaagcgctaaaaggcgctgacatggtgttcgttacagccggaatgggaggcggtaccggaacgggagccgcaccggttatcgcgcaaatcgcaaaggacttaggcgctttgactgtcggtgtcgtaacaagaccgtttacatttgaaggaagaaaacgtcagctgcaggctgcaggcggtatcacggcaatgaaagaagccgttgacacactgatcgttattccgaatgaccgcattcttgaaattgtcgataaaaacacaccgatgcttgaagcattccgtgaagctgataacgtgcttcgccaaggggtgcaaggtatctctgacctcatcgcgacgcctggtttaatcaacttggactttgccgatgtcaaaaccatcatgtccaacaaaggttcagcattgatggggatcgggatcgctacgggcgaaagccgtgctgctgaagccgccaaaaaggcgatctccagtccgttactggaagcggcaatcgacggagcgcaaggtgttttgatgaacattacgggaggtacaaacctgagcctctacgaagtgcaggaagcagccgacatcgtcgcttctgcatctgaccctgatgtcaacatgattttcggttcagttatcaatgaaaatctgaaagatgaaatcgtcgtcaccgttattgcgaccggttttatcgaacaggaaaaagatgactcaaaaccgcagcgtccgactttaaaccaaggattgaagtctcaaagccaaaacgctgcgaaacgtgagccgaaacgagaagaaacacagcatcaaaacacggtgaaccgccatacatcacagccggcggatgatgccctcgacattcctacatttttaagaaaccgcaacaaacgcggctgatgtaaaaaaggacaagaccacatggttttgtcctttttcttttgtgcacagtcttccttcctatccccatgatctatacagtgaaaaaagaaactttatacctatgacgaattgattgttttttaatttcatacggctttctacagaatgtgacaatatctggatgggagattgtctacatttaacgtacagcatcgaaataacaaacgattccaattatgaaggagggatacacattttatagggcgttaccaaataaggggggatacgattgaagaaaaaaacaagaaacagatggacaggctccgttttaagcgcgattgtcgtcagttccctgttgtttccgggtgcagccggagcgaacagcacaccgggggcagtttctttcaccaaagatctttcttcctctaagagcattcagcataagatttccgattcagtcaagaagcgttttgaaaaaaatgataaagtcacgtttcttatcaaatttaaagagaaagccaatacgaaaaaagcggtcaaagaagcagaaaaaaacgccaagtctcaatcgctttccgcagcaaaaaccgaatatcaaaagcggtcagccgtcgtttcttctttaaaactggcggctcatgatgcgcagcagaatctgaaaacatatttggaaaaacaaaaaaagaaaggcaaggctgatcacatccattcctattatattgttaacggaatggcagtcactgcttcgaaagaggtcatggaaaaagccgcctcatttcctgaagtagaaaaagttcttccgaatgaaaaacgtcagcttactcaacgacaatcaaaagctccttttcaaatgaagaaaaaacaaaaagagatcaaagcaaaggaaggcatcgaatggaatatcagccaaattgatgcgccgcaggcctgggcttcaggatacgacggaaccggcacggttgtcgcctccattgatacgggagttcagtgggatcatccggcgcttaaagaaaaataccggggttacgatcctgaaaatcccgcagcgccgaatcatgaaatgaactggtatgatgccgtgtcccataaagacgctccctacgatgatcttgaacacggcactcatgtaacagggaccatgacgggttcagaacctgacggctcaaatcaaatcggtgtggctccgggggcgaaatggatcgcagtaaaagcattttcagatgacggaggaaccgatgccgatattttggatgccggtgaatgggtgctcgcgcctaaagataaaaacggcacgccccatcccgagatggcgccggatgttgttaataattcctgggcaggcggttcgggaatggacgagtggtaccgcgatatggtgaatgcgtggagagcggcagggatttttccggaattctctgcgggaaatgaagacttatttacaccgggaggaccggggtcaatcgcaaatccggccaattatcctgaagcatttgcgacaggtgcgactgacatcgacaagaaactcgctgatttctcacttcaaggcccctcaccgtatcatgaaacaaaaccggacatttcggctccgggagtgaatatccgttcttcgattcctggaggaacatacgaaggcggctgggacggaacttcaatggccgggccgcatgtggcggcgacggcggctttgttaaggcaggcgaacgcctctattacggtcgatgaaatggaagacgttttgacgcgcaccgcggaaaagctgacagattccgtttttccggaatcaccgaataacggttacggccacggtctcgttaacgcttttgatgccgtttctgccgtaacggacggaatcggaagcgtagaaggcaaggtctcttctgcgggcgaagatcacaatccgccgagctttcaccatgaaccggtctcagcggcttacaaaggggcaaaccttccgttaacggttacagcagaagacgatgtaagcgtaactgaagtcatcctttcctatcagtttgatgaaggaaagtggaaaacgacagctgccgttcaaaaaagcggtgatgaaaaaaagggaacataccaggcggagattccggatgtaacgggaagcaaggtaagttataaatggaccataaaagatttcggaggtcattctgtagaatctgatacgtaccgggctgacgtgaaaccgagcattacggcgggatacaaagaggattttgaatcacagccggctggctggtccagttacgggacacatgaccaatgggaatggggtatcccgggttcagggcccggcaccgcattttccggagataaagtgtatgcgacgaatctgtccggcccttatgccgattcagctaatatgaatttggtgatgcctccgattcaagttccggaaacaggacggctgtttttgcaatttaaaagctggcacaagctcgaagaattttttgattacgggtatgtgttcgttcttccggaaggaaaatcaaattgggagcaggcggccgtttacaatggtgactccgcaggatggaatgatgaagaggcagatttatctgcgtataaaggccaaaacataaagctcatgtttaatatgcagtctgacgaagtactcaatgaagacggatggtatatcgatgatgtccggctttcaagcagccctctcggcaaggcggctaaaaaaagtaaacacaatagacaaacacctcccggccacctgaagaaaaaagccgtcagtccgaaacaggccaaaccggcagtgaaatcacccggaaaaagagtgaaacgtgaaacaaacctcctgctgccgctcagagcgcaaatcagtgtcgccgagacggggaaatccgtatattccgaccctgcaagcggaagctacagcctgtcacataaggcgggaagctatacgctgaaagccgaggcttacggatttaagtccgcttcgaaacaagtttctattcaatcagataaaaccgcacaggcagactttacactggagcaaatgccgtccggcacgctaaaaggaaccatcaccaatcagtcaacaggcgaaccggtaaaaggggctgcgctttatgtggctgaggatgccgcaattgaaccggcggtgacaaacgataaaggggaatattcgcttaaggcgtacgaaggctcctacacaatcaaagtagcggcaaaaggcttttacaatagcgaattttccgttgacatcaaaggagatgctgaaaaaaacgtcaagcttaagccgtatatcggttatgaaggggaaattgcctatgataacggaacggaagaagccgcgctgtcatattttaaagccggcagcaaatctgccgttaagatgacgctcaaagacggaaaagaacacggtatgctgacgggaggcctttttaaattttggggcgccgactggcctgatccgggcggtaccgaatttcaagcagaagtatatgatgtatccggccctgatggagctccgggcagcaaaattgccggcccgttccaagctgaagcgcttcgaaacggcgaatggaccaaagtggatctcagctcaaaaggaatcgcggtcggaaaggatttttatcttgtgttccgccagacgaaacccgatccttatacacctgccctgtcatctgatgacggcagtccgtactcgaacagaaactggcaatacctcgacggccgctggtctaaaaccgataaatcagacggaaactttatgatcagggctttggtcgactacgaagcttctgtgcctgacataacgtcgcctgaagatcggtcatttacaaacaagaagtcaatcacggtgaaaggaacggcttcaccaaaaaccgctgtccgtcttagcaataacggtaaaaccgccgcagaaacgaaagcagatgcagacggcaatttccaggccggtgtcacactcactgaagatgccaatcggctgacggtggcatctgtgacagacagcgggtcaaccgatgagtcacgccctgtcacggtcatactggatgaggataagccggatgtgacgattgacagtccggcaaacggtgataaaacaaataaagaagcagtgaccgtaaaaggaaaagtgcacgacgcccatttaaaatgggtaaaggtgaacggaaaaaaagctgaagtaaataacggttcttatcaagcgagaacccttctggaaaacggcagcaatgagatcaaggtcacggcctcagatgaagcgggtaacaaaacaacgaaaaagacggtgatcgatgtcaattacaatgctcccgtcatttccggattggttcccggagcggataaggaattaaaagccggagaatcagtgaaaatcgctttttcaagcggaaagaaattagacgcttccttcgttatccgtctgcctctgacaaacgcccgggcagggagccaaaacgcaacagagcttccgctgagagaaatttctccgggacgatatgagggttactggacggcgacttcttccatcaaagcaagcggagcaaaaattgacgttatcgctagagatgactacggaaatgaaacgagacagacggctaaaggaaaactttatatcaatgagtaagacagagcgctgccagatcacgggcagcgcttttttagttgaagcggacaataggaaagcaaccctttcggccctcgacaaataaaacggttatcccttaaaaattgtactttaccctcaacattaattgacagactttcccacagagcttgctttatacttatgaaacaagagagagaaacagataagtaagacaaaagaggaaaggggtcagatgtgaaaatctatctggatgtcatttggctgttgaacttttgttttgattctcttttgcttttattgaccgcctttattttaaaacgccaggtgaaaaaaagaagagtggccgccggcggtttcatcgggtcagccattgtgcttctgatgtttacgcctgtttctccctttgtggagcatccggcgggaaaaatggcgttttcagtagtcatcgtgcttacggcttttggctttaaacggttccgatacttttttcaaaatttgttcgccttttatttcgcgacttttctcgtcggcgggggaatgatcggcgtacattccctgctgcagacagaatcaattgtgcagcaaggtgtaatggtcacaagccagaccggattcggcgacccgatcagctggatgtttgtagttatcggatttccggccatatggtttttttcgaaaaagagaattgaagacatcgagacgaagtcaatccagtacgatgaacttgtcatggttcaggcggaattcagcggacagacaatccgcgcgaaaggattggtggattccgggaatcagctgtatgatccgctgacgaaaacgccggtcatgatcctttgcattgacagattcgctccgattctcagcgaaaaggaaacggacctcatcaaatccgccagtccgcttgaagtgatagagcagcttgatgattcgttccgccatgcggataagctgaggctgattccatacaggggcgtcggccaggacaatcaatttttactctgtttaaagccggattacgtcacgattttaacaaaagacgaaatgatcgcatgtgaaaaatgcctgatcggcatcagcacgaaaccattatccgcggacggtgaatttgacggaatcgttcatccgaagatgctgacagggaaggctgtaaaacatgtttcctgacgaaaagtctgttattcatcatactcaaaacgcgttgtatttagaagggggaggaagatgaaaaaacttaagctgcgtctgacatatttgtggtataaatggctgatgaaactcggactgaaaagcgatgaagtatattacataggaggaagcgaggcgcttccgccgcctttgtctaaagaagaggagcaggtgctcttattaaagctgccgagcggggatcaggcggcgcgggccattctgattgagagaaacttacgtcttgtcgtttacattgcccgcaaattcgaaaataccggcatcaatatcgaggacttaatcagcatcggcaccatcggtttgatcaaagcggtaaacacttttaatccggaaaagaaaatcaaactcgccacctacgcgtcgcgatgtatcgaaaacgaaattttaatgtacttgcgccgaaacaataaaatccgttcagaggtgtcctttgatgaaccgctgaatattgattgggacggaaacgagctgctgctttcggatgtgctcggcacagatgatgatattattacaaaagacattgaagccaatgtggataaaaaacttttgaaaaaagcgcttgagcaattaaacgaaagagaaaagcagattatggaactgcgtttcgggcttgtcggagaagaagaaaaaacacaaaaagatgtagccgacatgatggggatttcacaatcttatatctcccggctcgaaaagcggattatcaaaagactgagaaaagagtttaacaaaatggtgtaaaattttttccatctgacagcccttactgctgcaaggattgccgcagccggatgtttatttctgtaaaatggcggtgcatatttttcccacccgaggagatacttaacgttgtacagcagctcctagtgggagggaaaaacgtgtcaagaaataaagtcgaaatttgcggggtggatacctccaaattaccggtgctcaagaatgaagagatgagaaagctgtttaggcaattacaggatgagggcgatgattcagcgagggaaaagcttgtaaacggcaatctgcgccttgtcttaagcgtcattcagaggtttaacaacagaggagagtatgttgatgacttatttcaggtcggctgcatcggactaatgaaatccattgataattttgacctaagccataatgttaagttttcaacatacgctgtaccgatgatcatcggagaaatccgcagatatttgcgggataacaatccgatccgcgtctcgaggtcgcttcgcgatatcgcatataaagcgcttcaagtaagagagcggttaatcagtgagacaagcagggagccgacagcagaggaaatcgccaaagttcttgaagtgccccatgaagaaattgtgtttgcccttgacgccatccaggatccggtttcactgtttgagccgatttataatgacggcggcgatccgatttacgtgatggaccagatcagcgatgagcgcaataaggatacacaatggattgaggagctggctctgaaagaaggcatgagaagactgaacgaacgggaaaaaatgattttgcgaaagcgctttttccaagggaaaacccaaatggaagtcgctgaagaaatcggcatatcccaagctcaggtctcaaggcttgaaaaggcagccattaaacaaatgaataagaatatccatcaataacggaaaaagcctttaaaccttgtttaaaggcttttttcatgcgatggtttacgtttgcaaaaaagtgatgtattctaatgtgtaaaagtttttagaaaatttaaataaagtaaacgggggaaactgcaatgattttacagctggacagtgtgtcattaaaaagaaacgggaaatggattttgaaagatattaactggcgcgtcgagaaaaacgaaaattgggtgctgtacggattaaacggagccggaaaaacggctttgctgaatatgttatgctcttattacttccccacttcaggagagatgcaggtgctcggccatcaattcggcaaaactgagctcggtgacaggctcagaaggaaaatcggccttgtttcggcaggtcttcaacacaaattatatgccgcggactccgcttttgaaatcgccctcagcggcgcgtacgcctcaatcgggctgtacgaaactccaagtgagcaggtaagggaaaaagcgatcggtcttctgaaggatttgggcgccatcagttacgccgacagacgctatgaaacattatcacaaggggaaagacaaagagcgctgattgcgcgggcgcttatggctgatccggaactgctgattttggacgaacccgtgacgggtcttgattttatggcaagggagcagctgctggacacgattacgtcgatcgccgaaaaagaaaatgcgccgtccatcctttatgtcacccatcacgctgaagaaattctgccggtatttgatcaggcgctgcttttaaaacagggcgaggtgttcgcctccgggaaaatcagggacatgctttctgacgagcggcttacagcgtttttcgatatgcctgtcaatgtcttatggaacaatggccgcccgtttttaacacgtgcaaaagaggcatcatccgtaaaataacataaattcaccctgggggtgctgccatgcggctgagagagacgttgtctcaacccttaaaggacctgatccggatcatgccggcggagggaagcggtgaaaaaagcggaggaagatccgtttttcacccgtttcatttcatgaatgaaacggtttttttgatacagccaaaggggagatttccaatgcatcagattgatatgctgttacaccaggcggaaaaacggcggaatgacttcatacatattgctgaaaggttgatagcctttccgactccggccccgccagcaagaaatacggcagaagcccaaaagtgggtggccggctttttaaaagaaacgggctgctcggtcgatatgtgggatgtgtatccggaagatccgaatgtagtcggtgttttaaaagggacagattcaagcaggcatcaaagcctgattttaaacggacacattgatgtggcagaagccgggggcgaagactggcactctgacccgtttcagccgatcgtaaaagacggcatgctgatcggaaggggcgccgctgatatgaaaggggggttggcgtgtgttcttttctctctgaagctgatccatgatgccggcattgagcttccgggcgacctcattgtacagtctgtaatcggagaagaagtcggtgaggcggggacgctggaatgctgcaaacgcggctatcacgcggattttgccgttgtcgcggatacgagcagcctgcatattcaagggcagggcggagtcatcaccggctggatagaattgaaaagcaaacaaacatttcatgacggcatgaggcgcaatatgattcatgcgggcggaggcacattcggagcgagcgccatcgaaaaaatggcgaaaatcatcactgccttgggagagctggagcgccactgggcggtaacgaaaagctaccccggctttgcgcccggcaccaatacgatcaaccctgccgtcattgaaggcggaagacacgcagcgtttgtcgccgatgaatgccggttatggatcaccgtccacttttatccgaacgaaacgcacgaacaagcagccgcagaaatcgaagactatattaatcgtgtcgctgacagtgatctgtggctcaaagaaaacaggccggtgttcaaatggggcggatcttcgatgattgaagacagaggagaggtgttcccggcgctggaaatcgacccggatcatccggcagtttctgtcttagctgcatcacactcagccgtcagaaaacaggagcccgtcattgatgtttcccaaaccgtaactgacggagggtggctttatcatgccgggattccgagcgtcatatacggtcccggcgatttaaaaaacgcccactccgtaaacgaggaagtgtccgttgatgagcttatggactatacgaaaattatgctgagatttatcctcggctggtgcagccgcaaaaaagattgcccgatgtgacaaggttcagcccggccgttcatataatagaaaaaagaacgggcaaagggcgtgatacggatgatcagcatatctgaatttcaaataaaagatgtggtaaacgtgtcgaacggaaaaaaactcggaagcatcggtgatattgatattaacgtgacaacgggaaaaattcaggcgattattttaggcggcagcggaaaagttctcggttttttcggaaaagaagaggaaatgatcattccttggcgaaatatagttaaaattggggaagatgtcatcttagtgcgtgtaaatgaaccaaaggggggagagtaatcctccctttacttgtaaaaagccggaaatctcaatgtttccggcacatttatttatctcatttttcaatcagccgctaaacgtatgcttaaaattgtgttaaaatgagtgggaaattacgcttttttaatgtttgtcgaaaggttggatcttcatgaatacatatcacccgtttagtcttaccaccccctcggcactcatgatagaagactggaactgtgtgaatcagcttaacacaaaggtcatcgccggattcacaacgaaaaacggcggggtcagcaatcctccgtatgagtcattaaataccggattgcacgtccgggacgaagctcatgatgttgtgacaaaccgtgaagtcatagcgtccttatgcggtactgatctggattcctgggtgttcgccgaccagacacatgaaaaccgcgtccggcgcgtgacagccggtgataaaggaaaaggggcgagagactattcttccgcattccgcgggacggacgggctctacacgaaagatgcgaatctttttttggccctttgttttgcggactgtgtgcccttgtatttttatgacccggtgaaatccattatcggcgctgcccatgccggatggaaggggacggtcaaacaaatcggacgcatcatgacggaacgctgggtaaacgaagaaggctcccgtttaacagatattcaggctgtcatcggtccgtccatcagcgcgggaagctatacagtcgacgaccgcgtcatcaatgaagtgcgggcgctgccttttacggctgaatccgccatatgcgaaacggaaaaaggccagtatcagcttgatttaaaagaggtcaaccgtcttcttctgatacattgcggcattccggaagaaaacatttcagtcagcggtttatgcaccgaacgagagcgtgaactattcttttcacaccgccgcgacaaagggaaaacgggacgcatgatgtcctttatcggaatgaaggaggcataagatcttgcgtgttgctgatcaattacgacatataaacgaaagaataaacgaagcatgtaacagatcgggccgaagctccgaagatgttaccgtcatcgcggttacaaaatacgtatcagccgaaagggctcaagaggccgttgatgccggtattacaagtctgggagaaaaccgggatgccgagcttatccataagcaggaagtcatcaaaggcagcccggagtggcactttatcggcagtcttcagtccagaaaggtgaaggccgtcgttgaccgtgtatcttatatacattccttagacagactgtcattggcaaaagagattgaaaaacgggcgcagcatgcggttcgctgttttgtgcaggtgaatacttcgcttgagccgtctaagcacggtttgaaaacagaggaggtcatcccctttatcagagagctttctgagtttagaaacatttctgtagagggcctgatgacgatggctcccctgacagacgatacagaaacgatcagagcctgcttccggcaattgcgtgatctgagggatcaggtgcaaaaactgcatcagacaaacgcaccgtgccgggaactgtcaatgggcatgtcaaatgattatgaaatcgctgttgaagagggcgcaacttttatcagaatcggctcttcattagtcggaaatgaaccggggggtgtaaacaaatgagcatgaaaaataaactgaaaaactttttctcaatggatgaggaggagtacgagtacgaatacattgaaacggagcaggatcatccggaagagcatgaacagcagaaagataaacagcctgcttacgctcagaagccgcagggcaagcagaacgtagtaagcttgcaaagtgttcagaaatcctctaaagtggtgttgagtgaaccgcgtgtatatgcggaagcgcaggaaatcgccgatcatttaaagaacaggcgggcggttgtcgtcaatctgcagcgcatccagcatgatcaggcgaaaagaatcgtcgactttttaagcggtaccgtctacgccatcggcggcgacattcagagaatcggttcagatatttttctgtgcacgcctgataatgtcgacgtttccggcacgatttcggagcttataaatgaagacgaacatcagaggtggtaaagcaggatgattctttatcaaattttttccgttctgagttatttaatttacatctactcgtttgccctgatcatctatatctttatgtcatgggtgccgagtacgagagaaacggcggtcggacggtttctcgcagcgatttgcgaaccgtatttagagccgttcagaaggatcattccgcccattgccatgctggatatatccccgattgtagcgattatcgtgcttcggtttgccacgacgggactttggggcctataccgcatgatcgcaatgtatacttgaatgcgacagtttgatacgggcttggcaccagccaagcctctttacatagaaaggaaagaacatgagcgatatttaccagcacttcagacaagacgagcggccttttattgatcaggcgcttgaatggaaacagattgtcctggaccagtatcggatgaagctgactgatttcttagatcccagagaacaggtcattgtaaaagccgttatcggcgacgcctgcggtcttgcgtttttcggaggatatgacagagctgagcgcaaacgcgcgattttataccctgaatatatggaacctgaacaggatgattttgagcttcgggcttttgacgttcaatacgctgaaaaattcgtcagcattgaccaccgctctcttctcggatcattaatggggatcggcttaaagcggcagaaatacggcgatctgattttctcagaggaagccgtgcagctgatcgtctccggtgaaatcgccgattttgtcagcactcagctgaccaaggcgggcaaagcgccggtaaagcttgagaaaatcgagctttccgctcttcacattcccgcttcagatgtcgaaataagggatgacacggtttcttcattgcgtctcgacgccgtctgcgcttcaatgagcaggcaatcccggcagaaagcgcaggcgcttgtgaaaaacgggctcgttaaggtgaattggaaagccattgaagatccgtcttatcaggttgctgaaggggacatgctctcgattcgcggcttcggacgatgcagtttggcaaaagttgacggaaaaacgaaaaaagacaaatggaaagttacatttgaacggcaaaaatgagtcgttttttcagtttttttctccatctgtgccgtatttgttttataatgtgaactagataaccgtactgaaatgtaaaaatggaggtggcaatatgccattaacgccgaatgatatccataacaaaacgtttacaaaaggttttcgcggatatgatgaagatgaagtaaatgaatttttaatgcaggtcagaaaagattacgaaatcgcactccgtaaaaaaacggagcttgaggcgaaagtgaacgagctggacgaaaaaatcggccactttgccaatatcgaagaaacgctgaataaatcaattctcgtagcccaggaagccgcagaagacgtaaagcgcaactcgcagaaagaagcgaagctgatcgtccgtgaagcagaaaaaaatgctgatcgcatcatcaatgagtcgctttccaaatcaagaaaaatcgcaatggaaatcgaagagctgaaaaaacagtctaaagtcttcagaacacgtttccaaatgctgattgaagcgcagctcgacctgctgaagaacgatgattgggatcatctgctggaatacgaagtcgacgcggtatttgaggaaaaagaataattttctgattttcttgacattctccggcccgttcgaatataatacgttcataaattcagatgaaaagacgattgaaagggaccggcatgactcaaaacaggctataaagcgaaccggggaaggtgaaagcccgggatggccggaatcatgcagatcagccctttagtttcctttctgaaccgagagtaggaaaggacgttccatcacgttacgatgttcgagaggaaaagacggatgatccgttttttctaaaagggtggtaccgcgagatagctttctcgtcccttatgggatgagagggctttttttattttctgaaaaatgttgtggaggaatgaaaatggattacaaagatacgctgttaatgccgaaaacagattttccgatgcgcggaaatctgccgaatcgtgagccggacatgcaaaaagactgggaggagcaggacatttaccgtcttgttcaagaacggacgaaagaccgcccgaaattcgtattgcatgacggacctccttatgcaaacggagacatccacatgggccatgccctgaacaaaatcctgaaagacttcatcgtccgctataagtcaatgagcggctacaacgcgccttacgtgccgggctgggatacgcacggactgccgattgaaacggcgctgacgaaaaacaaaaaagtaaaccggaaagaaatgtccgtcgctgatttccgcaagctttgcgaagattatgcatggcagcagatcgaaagacagcgcgaacaatttaagcgtctcggcgtcagaggcgattgggaaaacccgtatgttacgcttcagcctgaatttgaagcgcagcagatccgcgttttcggcgagatggcgaaaagaggctatatttataaaggtctgaagccggtcaactggtcgccttcaagtgaatctgccttagcagaagcggaaattgaatatcaggacaaacgttccgcgtctatttatgttgcgtttaaggtgaaagatggtaaaggcgttctggaaaacggagaaagcttcatcatctggacgacgacgccgtggacgatgcctgccaacctcggaatttccgttcatcctgatcttgagtacaatgtcatcaaggttggagacaagcgttatgtagtggctgctgaactgatcgaaaacgtagcggaggcatgcggctttgaaaatcctgaagttgtcgcatcatataaaggcagagaattagaatacatcactgcagaacatccgctgtacggcagagattcactcgtcatgctcggtgaccacgtcacaaccgatgccggaacaggctgtgttcatactgctccgggccacggggaagatgactttatcgtcggccaaaagtacggcttagaagtactgtgccctgttgatgaaaaaggaaacatgaccgacgaagcgccgggctttgaaggaatgttttacgataaagccaataaaccgatcacggagaagcttgaagaaaacggcgcgctcttgaaactcgagtttattacacactcctatccgcatgactggagaacgaaaaaaccgaccatcttcagagcgacggcgcaatggtttgcgtcaattaaagatttcagatccgatctgcttgatgccatcaaacaaacgaagtgggtgccggagtggggcgaacagcgcctttacaacatggtgcgcgaccgcggtgactggtgtatctcaaggcagcgcgtctggggcgttccgatcccggtattctatgcagaaaacggtgagccgatcatcactgacgaaacgattgaacacgtgtctgagctgttcaaacagcacggctcaaacgtttggtttgaaagagaggcaaaagaccttctgccggaaggatttacacatccgggaagcccgaacggaatcttcacgaaagagcaagacattatggatgtgtggtttgattcaggttcttcccatcaggctgttcttgaagaacgtgatgatcttgtccgtccggctgatttataccttgaaggctctgaccaataccgcggctggtttaactcatctctttccaccgctgttgcagtcaccggcaaagcgccgtataaaggcgtattaagccacggatttacacttgatgcaaacggccgtaaaatgagtaaatcactcggcaatacgattgacccgacaaaaatcgcaaaacagcttggagctgaaattctgcgtttatgggtatcttccgtaaactatcaggccgatcacccggtttctgaagatattctgaagcaggtcgcggaagtataccggaaagtccgcaacacgttccgcttccttcacggcaacctgttcgatttcaatccaagtgtcaatgccgttgatgtaaaagatctccgcgaagtggatcaatatatgctgatcaagctgaataagctgatcgataaggtgaaaaaagcgtacgatgaatatgaatttgcggttgtttatcacagcattcacaatttctgtacgatcgagctcagctctttctatcttgattttgcaaaagatgttgtgtacatcgagcatgcggatcatccggaccgccgcagcatgcagaccgtcttctatgaaacgctgctggcgttagtgaagctgacggcgccgattctcccgcatacggcggatgaaatgtggtctcacttatcatttgttgaagaagcgagcgtgcagctgacagatatgccggaaaccattgctgttccggacagtcaagcgacagaagaaaagttcgaccgcttcatggagcttcgaaacgacgtgctgaaagctttggaaacagcccgtaacgaaaaaattatcggaagatcattggaagcgagcctgactttgtatccgaacaaagaaaaccgcgacctcttgtcatccattaaagaaaatatcgcgcagctgtttatcgtctcagaactgacagtaaaagacgaaagtgaagcaccggaaaacgcgcaaagcttcacaacaggaaaaatgaccgtagaaaaagcggaaggccagatgtgtgaacgttcccgcgtaatttctaaagatgtcggagccaatccgaaatatccgacattatcactgcgcaatgcggaaatcgttgaaaaatattatcaaaaataatgaatgagaaagcgcccggtgacagccgggcgcttttttacatgccactaatgtcatcgattagaacgacaggaaaaatcttatgggcttcaaatggcgctctgggggcaacaataaagccataacatcaagagcaggagttgtgatgaatgaatgatcaactgaccgcaatccacacggagcttctcatgatgaaagaagaacttcaatcaagattattcgaatattcttgctttcaaatgtcagcatctgttgaaccttcaatgaacgaccaagaagcaactctgatctatcatataaaagaagaacttcaggacgttcttcttgccctgtctaagtttgaaaacaatacgtacggttattgtgaaaaaacaggcgcccccattccgattgaaaaacttgcggtgctgccgacggccagaaccgctgatgatttttattaccccgctcaatttgaaaagaaaacccttccatattgggaacttggagattatgcatatgatcaggcgctgtatgagtgacagcgtctgtttgcatacgcttatgatctgcctttactctggcatcttttactgataaaattcataaaggataaaagtaactgtatactggaggaacgtgtgtgctttattatctaatcgctctttttattattattgccgaccaattgaccaaatggcttgtcgtcagccatatggaattgggacaaagcatacctgtcatcgatcaggtgctttatatcacatctcatcgcaacacgggagcggcgtggggtattttagccggccaaatgtggtttttctacgtcattaccatcgccgtgattatcggaatcgtttattacatacagcgttatgcaaaagggcagatgttactcggaatttctctcggcttaatgctgggcggtgcggccggaaactttattgaccgggcggcgcgccgggaagtggtggattttattcatgtcatcatcgtggattatcactatccgatttttaatatcgcggattcctcactgtgcgtcggtgtaatacttttatttattcatatgctgtttgacagcgggaaaaagaaggagcaataacatgaatcaatttgagataaccgttcagcctgaacaaaagagcgaacggattgataaatttttggcttcaacgggagaaaactggtcacgcactcaagtgcagcaatgggtaaaagagggattggtatccgttaacggcaaatccgtaaaagcgaactacaaaatgcagcctggcgatcaggtaaacgtcaccattcctgaaccggaagaattggacgtgcttgcagagccgatggatttggacatttactatgaggatcaggacgtcttggttgtgaacaaaccgcggggcatggttgtacacccggcgcccggccatgtgacagggacgcttgtaaacggactgatggctcactgcaacgacctttccggcattaacggcgtcatgcgcccgggaatcgtccaccgtattgataaagatacttccggtctgttaatggtcgctaaaaacgatatggcgcatgaatcactcgttaatcagctcgtcaataaaaccgtgaccagaaagtacaaagcggttgtccacggggtgatttcacatgatgacggaacaattgacgctccgatcggtagagataaaaaagaccgtcaaagcatgaccgtaacaagagaaagcagcaaaaacgccgtcacgcacttccacgtgcttgagcgttttcaagatttcacgctcgtagagtgccgtcttgagaccggaagaacgcatcagatccgtgttcatatgaaatatatcgggtttcctttggcaggcgacccgaagtacggaccgagaaaaaccattgatttcaatggtcaggcgcttcatgccggaatattaggttttgatcatccgcggacgggcgaatacatggagtttgaagcgccccttcctgaagatatgaaaaaactcattgaagatttaagaaatagccattgacagcgactttcttttctgaaataataaaaacaagctgaatagattctttaacacagtccagagaggctgagaaggataacggataggacagaagagatacgcatgtgtcttcgtcctggaaaggaacccctctatgctctggcaggaggggttttttcttcttatatacgaatggagaggtgtcacgagtgaatcaaaaagctgttattctcgacgaacaggcgatcaggcgggcgctgacaaggatagcccatgaaatgatcgaacggaataaaggaatgaatgactgcattcttgtagggattaaaacaagaggcatttatttagcaaagcggctggccgagcggatcgaacagattgaaggaaatccggtcaccgtgggggaaatcgatatcaccctttaccgtgacgatctgacgaaaaaaacgagcaatgaagagccgcttgtaaaaggcgcggacattccggctgatattacagaccaaaaggtcattgtggttgatgatgtgctttataccggccggacggtgagagctgcgatggatgccctcgttgatgtcgggcggccgtcatcgatacagcttgccgtgcttgtcgacagagggcaccgggagctgccgatcagagcggactatatcgggaaaaacattccgacctcaaaagctgaaaaagtgatggttcagctgagcgaagttgatcagactgatatggtcgccatttacgaaaatgaataatcaccctttttaaatgcattccagagagtctgcaaagaggattttaaaacacaaagccgggcggatcgacgcggccgggttttgtatgcctctttgcgcaaaaagcaaagaggtttttttataccatttgaaagtcaaccgggaggaaaacgccatgagtaagaaaaaagtaaacttgggagtcagggacgtccccaatccattgtcctggctgtcattcagcctgcagcatttattcgccatgttcggttcaaccatactcgtgccgaaactggtcggaatgagcccggcagtggcgcttgtcacgagcggaatcgggacactcgcctatctcttggtgacaaaaggccagatccccgcttatctcggctcatcattcgcctttatatcaccgattatcttggtgaaggcgacgggagggccgggggctgccatggtcggagctttcctggcgggaattgtgtacggcctgatcgcactgctcatcaggcagcttggaacggggtggctgatgaagctgctgcccccggtggtcgtcgggccggtcatcattgtcatcggcctcggactggcaagcacagccgtcaatatggcaatgtatgccgatccgaatgcaaaggaactcgtctacagcttgaaacatttcagtgtagccggcgtcactttggccatcaccattatctgcgccatctttttacggggatttttaagcctgattccggtattgatcggcattataggcggctatctgtttgcgctgacacagggcatcgtcaatttccagccggtcattgatgcaaaatggttcgccgttcctgaatttatcatcccttttaaagactatacgccgtcagtgacattgggcattgcggctgcgatggtgccagtcgctttcgtgacgatgtcagaacatatcggccatcaaatggtgctgagtaaagttgtcggacaggatttcattaaaaagccgggactgcaccgctccataatgggggacagtgttgcgacgatcattgcttcgttaatcggaggcccgccgacgacgacatacggcgagaacatcggtgtcctggcaattacgagagttttcagcgtctttgtcatcggcggcgcgggtgtgattgcgctgtgcttcggatttatcggaaaagtatcagcgctgatcagctctgttccgtccgcggttatgggaggcgtttccttcctgctcttcggaattatcgcctccagcggcttaagaatgctgattgacaacaacattgattatgaaaacaagagaaatttgattatcacatccgtcatcctcgtgatcggcgtcggaggggcttttattcaagtatcaaaaggcgggttccaaatatccggcatggcgcttgcggcaatcgtcggagtcatcctgaaccttatcctgccgcatgcaaatgaagaagacgcgattgcatcagaaaaacaaaatcatatgtaaaaccttttaaagaaagtccagagaggcttggaagggttataacgggaagaagctgtacgctgcttctctctttaaccgcaccccgagtctatagaccggggtgtttttttacggccttcaagcggaaacggaggagaaaaacatgaatcatttaacggcgatgtctgaactgagcgcggctgaaattacagaactgctgcgtgaggcaaaagcgataaaagagggaacagtccgccccgatctcgcgggaaaatttgttgcgaatctgttttttgaaccgagcacgagaacgcggttcagctttgaagtggcggaaaagaaactcgggatgaacgtgctcagcttagacggcacgagcacaagcgttcaaaaaggcgagtccttatatgacacggtcaaaaccctggaatcaatcggagcggacgcctgcgtcatcaggcacagcacggatgaatattacaaagatctgaccggcagagtcaatattccgatcttaaacgccggcgacggctgcggccagcatccgacccagtcgttgctcgatttaatgacgattcaagaggaatttgagacctttcagggcctgacggtttccattcatggcgatatcaaacacagcagggtggcaaggtcgaatgccgaggtgctgacaaggctcggcgcacgcgtgctgttttcagggccgccgcaatggcaggatgagaaaaacgccttcggcacctgtgtacagacggatgaagccatacaagcttcagatgtcgtcatgctgctccgcattcaaaatgaaaggcatcagacagaagccgaccaaaaaggctacctggaagcatacgggctgaccgcaaagcgggcggagagcatgaagcggcatgccatcatcatgcatcccgcaccggtgaacagaggagtcgaaattgacacaacattagtggaatgcggaaaatcaagaatatttaaacaaatggaaaatggcgtgtatatcagaatggcagtcttaaaaagagcactgcaaaccaatgtgaaaaggggagaagcggcttatgtcttatctcattaaaaacggctggatgttaaatgaacagggagaaaaagtggcacaggatatccgggtaacgggtgaattcatttcggaaaccgggcttctgacagcgaaagacggagaaacggtgatcgacgctgagggactgttcgtttcaccggggctcgtagaccttcatgtccacttcagagaaccgggcggcgagaaaaaagaaaccattgagacgggctctaaagccgcggcgcggggcggctttaccacagtcgcagccatgccgaatacaaggccggtgccggatacgaaagagcagatggaatggctgcaaaaccggatcaaagaaacctcatctgtcagggttcttccttacgcatccattacgatcagacaaaccggccaagaaatgacagattttaaggcgcttcatgaagccggcgcattcgccttcaccgatgacggcgtcggggttcagacggccggaatgatgtatgaagccatgaaacgggcggcttcaatgaataaagcgattgtcgctcattgtgaggataactcgcttatttacggagggagcgtgcatgaaggatctttttcaaaagcgaacggcctgaacggcataccttccatttgtgaagcggtacatatcgcccgtgacgtcctgctggcggaagcggcgggctgccattaccacgtgtgtcatatcagcacgaaagaatctgtcagagccgtaagagacgcaaaaaaagcgggaatccgcgtgacggcggaagtgtcgcctcaccacctgctgctttgtgacgaagatatcccgggacttgataccaattttaaaatgaatccgccgcttcgcagcaaagaggacagagaggcactgattgaagggcttttagacggtacgattgatttcatcgccactgaccatgcgccgcatacagaagaagagaaaaacacggatatgaagcttgcgcctttcggtatcgtcggtttagaaactgcctttccgcttctgtacacacattttgtgaaaaaaggggcgtggacgctgaagcagctggttgatttcatggcggtaaaaccttgcgaagcattcggtcttccgtacggaacgcttgcaccgggcgcgcctgctgacatcatcctgattgatctggaaaaagaagcagccattgacaaagatacatttttatctaaaggaaaaaatacgccattcaacaagatgaagtgcttcggctggcctgttgcaacgatggctgccggtaagcttgcatacgaagaagggagactcgtcaaatgaaaagaagactagtgctggaaaatggagcggtatttgagggtgaagcattcgggagcctggagcataccgcgggtgaagtcgtattcaacacgggaatgaccggttatcaggaaattttatcagacccttcttactgcgggcagatcgtgacgctgacgtatcctctgatcggcaactacggaattaacagagatgactttgaatccatcactccttttgtaaaagggctgatcgtaaaagaactgtgcgagctgccttccaactggcgttcggcttacacgcttgacgagtatttgaaaatgaaaaatatccccggcttacaagggattgacacgagaaagctcacaagaatgatccgcacggccggcgcattaaaaggaacgtttgcttcaagtgaggagaatgtcggagaggttcttgcaaggctgaaagaaacggaactgccgagaaatcaagtcgctcaagtatctgcgaaaacggcatatccgagtccgggccgcggcaaacgcatcgtactcgtcgatttcggtatgaagcacggcattttaagagagttaaacaaaagaaaatgcgatgtcatcgttgtgccgtacaatgtaacggcggaagaagtgcttcagctcaagccggacggcatcatgctttctaacggacccggagatccgaaagatgtgccggaagccattgaaatgataaaaggcatactcgggaaggtgccgttattcggaatctgcctcggccaccaattatttgcactggcatccggagcggaaacggaaaaaatgaaatttggacacaggggttccaatcatccggttaaagagcttgcgacagggaaagtcgctttaaccgcccaaaaccacggatatacagtttcttcaatagatgagacagagcttgaagtgacgcacattgcgatcaatgatcaaacgatcgaaggactcaagcataaaacattgccggcatttacggttcagtaccaccctgaagcttcaccggggccggaagacgccaatcatttatttgacagattcattgacttgatcgaaacaactgagaaagaaggggaagcggtatgccaaaacgcgtagatattaaaaagattttagtgatcggatcaggcccgattattatcggacaggcggcggaatttgattatgcgggcacacaggcgtgtctcgctttgaaggaagaaggctatgaagtcattctcgtcaactcgaatccggcaacgattatgacggatacggaaatggctgatcgggtatacatagaaccgctgacgccggagtttctcactcgtattatcagaaaagaacggccggacgccatcctgccgactctgggaggccagaccggactgaatcttgccgttgagctgtctgaactcggggttcttgaggaatgcggggtggaagtgctcggcacaaagctgtccgccatccagcaggcggaagaccgcgacttattccgtacgctgatgaatgagctgaatgaaccggtgccggaaagtgagatcatccgcactttacaggaagccgaggaatttgtcggccggatcgggtttccggttattgtgcgccccgcttacacattaggcggaacgggcggcggcatctgctcgaatgaagcagaactgaaagagatcgtcgaaaacggattaaaactcagccccgtccatcagtgccttctggaaaaaagcattgccggttacaaagagatcgaatatgaagtcatgagagacagcagagatcacgcgatcgtcgtctgcaacatggaaaatatcgatccggtcggcatccatacgggcgacagcatcgtcgttgccccgagccagactttgagcgaccgggaataccagcttttgcgcaatgtttcattaaagctgatccgtgcgctcggcattgaaggcggctgtaatgttcagctcgcgctcgatcccgacagcttccaatattacattatcgaagtgaatccgcgggtgagccgctcatctgccctcgcctcaaaagcgacgggttacccgatcgcaaagcttgcggcgaaaatcgcagtcgggctttctcttgatgaaatgatgaatcccgtaacgggaaaaacatatgcggcttttgagcccgcgcttgactatgtcgtttctaaaatcccgcgctggccgttcgacaaatttgagtcggcaaaccgcaggctcgggacgcaaatgaaagccaccggagaggtcatggccatcgggcgcacccttgaagaatcgctgttaaaggcggtccgctcacttgaagccgatgtctatcacctggaactgaaggatgcggaagagatttctgacggacttttggaaaaacggatcagaaaagccggggatgaacgcctgttttatcttgctgaagcgttcagaagaggctatacagtggagcagcttcatgagttttccgcaattgacgtattctttttgcacaagctctgtaagctggtcgcttttgaaacagagctgaaagcggaaaaaggcagcctcgccgtccttcagacagcgaaggaactcggtttctccgacaaatatatcagccgggaatggaacatgccggaacaagagctgtatcaaatgcgaaaagaagcagccatcaagcctgtatataaaatggtggatacatgcgcggcggaattcgaatcagaaaccccgtacttttacagcacatatgaggaagagaacgagtctgaggttacatcaagaaaaagcgtcgtcgtcctcggttccggcccgatccgtatcggacagggcgtcgaatttgactatgcgaccgttcattctgtctgggcgatcaagcaggcaggctatgaagcgattattatcaacaacaaccctgagacggtgtccactgatttcagcatatcagacaaactgtattttgaaccgctgacggtagaagatgtcatgcacatcatcgatttggaacagccggaaggcgttgtcgtccaattcggcggccagacggcgatcaatcttgcggaagaattgagcgcccgcggcgtcaaaatcctcggcacatcacttgaagatttagaccgtgcggaagaccgggataagttcgagcaggcgcttgaggcgctgaatgtgccgcagccgctcgggaaaaccgccgtgtcggtgaacgaagcggtcaaaatcgctgcatccatcggctatccggtacttgtccgcccttcgtatgtgctcggcggccgggcgatggaaatcgtctatcacgaagaagagctgcttcactatatgaaaaatgcggtcaaaatcaacccgcagcatccggtgttaatcgaccgttatctgacggggaaagaaatcgaagtcgatgccgtatctgacggtgaaacagtcgttattccgggaattatggagcatatcgagcgggccggcgtccattcaggggattcaatcgccgtctatccgcctcagtctttaagcgaagacattaagaaaaaaatcgaacaatacactgtagccttggcaaaaggccttaacatcatcgggttgctgaacatccagttcgtactgtcgcaaggtgaggtgtatgtgcttgaggtaaatccgcggtcaagcagaaccgtaccgttcttaagcaaaatcacaaaaatcccaatggcgaatctggcgacaaaggtcattctcggtcaaaagcttgctgatttcggctatcaagaggggctgcagcctgaacagcagggggtattcgtgaaagcgcccgtcttctcattcgcgaagctgagaagagtggatattacgttaggccctgaaatgaagtcgacgggagaggtcatgggcaaagattcaaccctggaaaaagcgctctataaagcgctgattgcttctggcattcaaatcccgaactacggctcagtgctgttgaccgttgccgataaagataaagaagaaggactgctgatcgccaagcggttccacgccatcggctataaaattttggcgacagaaggaacggcggcttatttgaaagacgctcagattccggctcaggtcgtcggaaaaatcggcgaagaagggaaaaatctgctcgatgtcatcagaaacggcgaagcgcaatttgtcatcaatacgctgacaaagggcaaacagccggccagagacggcttcagaatccgccgcgaatccgttgagaacggagtcgcctgcctgacatctttagatacggccgaagccattttgcgggtattggaaagcatgacattccgggcggatcatatgcctgcatccgaaaccaatcaaaaggcggcagtcacgatatgaaaaaagcgcatttgactgttcaatccaacttagagattgccgaccgggtttataagatggtgctgaaaggagagcttgtccggcaccttaccgagccgggccaatttcttcatctgaaggtgagtgacgcggtcacgccgctattaagaagaccgctcagcattgcggacgtcaatttcgccgcgaatgaagtatccgttatctacagagctgacggtgaaggaacgcgtcttttgtccgggaaaaaagagggcggcaggatagacgttctcggccctctcggcaacgggttccccgtccggcggattgaacccggcaaaaccgcgctgttagtcggaggcggagtcggggttccgcctttgcaggaactgtcaaagcgcctgacggaaaaaggcgtaaacgtcattcatgtgcttggatttcaatcagcaaaggatgttttttacgaacaggaatgtcgtgcgtacggagacacctatgtggcgacggctgacggaacatatggagagaaaggatttgtcaccgatgtcatccgtgaaaagcagctcgaattcgatgtcctgctaagctgcggaccgacaccgatgctgaaagctctgaagcagcagtacggccataaagaggtttatctttcgatggaagagcggatgggctgcggcatcggggcctgcttcgcctgtgtgtgccgcacgggtgaaagcgatacatcctatgtaaaggtctgccttgacgggccggtatttaaagctgaggaggtggcgctgtaatgttagaagtgaatctgccgggtctccaattgaaaaatccgatcatccccgcttccggatgtttcggtttcgggaaagaatatgccggattttacgatttatcatgcctcggaggcattatgattaaagccacgacgaacgaagcccgcttcggaaatccgacaccgagagtggcggagacaagcgcgggaatgctgaatgccatcggactgcaaaatcccggccttgagcatgtgctcaatcatgagctgccttggctcgaacaatttgacacgccgattatcgcaaatgtcgccggttctcaggtggacgactataaagaagtagccgagcacatcagccaagcgccgaatgtgcatgcgcttgagcttaacatttcatgtccgaatgtcaaaacgggggggattgcttttggtactgatcccgtcatggcggccgaactgacaaaagcggtgaaagaagtttccgcagtgcctgtgtatgtgaagctttcgcctaatgtcgcaaacataaccgaaattgctaaagcgattgaagcggccggtgctgacggtctgacgatgattaatacactcatcgggatgaggcttgatctaaagacgggacggccgatcttagcaaataaaacgggcggactgtcaggcccggcgatcaaaccggtcgccatccggatggtatacgaagtcagccaggccgttcaaatcccgattatcgggatgggcggcgttcagaccgcagaggatgcattagaatttcttcttgcgggagcgagtgcggttgccgtcggcacggcaaacttcgtcaatccgttcgtctgcccggaaatcatagaacagctcccccgtgtactgaaccaacacggctttcaatctgtaagtgaatgcatcggaaggagctggaaacatgaaaaacaacctgcccatcatcgcgcttgattttgcatcaggggaagagactttaacgtttttagacttgtttgaaaaggaaaggctttttgtcaaaacggggatggaacttttttatcaggaaggccccgccatcattcaccaattaaaagaacggaattgtgatatatttttagatttaaagcttcatgatatcccgactacggtcaataaagcgatgaagcggctggccggcctcggcgttgatcttgtcaatgtgcatgcagcagggggcgcacgcatgatgcgcgcggcccttgaggggcttgaagaaggcacgccggcaggcagaaaacgcccgtctttaatcgcggtgactcagctgaccagcacttcagagcaggtggcgaaggaagagcttctgctgcataagccgctgttagaaacggttgtgcactacagcaaaatggcggaagagtgcgggctggacggagtggtatgttcggtacatgaaacaaaagccatttatgaagcggtccggccttcatttctgacagtcacaccgggcatccgcacggccagtgacgcagctgacgatcaagtccggacggcgactccgtcatttgcgaaaaaaaacggttcgtcagccatcgtcgtgggccgctcaattacaaaagcggaaaaccccgttgaagcatatgaagcaattaaactggaatgggagggcgttcgccgatgaaacaggctatcgcaaaacatctattacacattgaagctgtctttttacgcccgaatgagccgtttacgtgggcgagcggcattttatcaccgatctattgtgacaaccgtctgacattgtcgtatccaaaagtgagaaatgatgtggcggacgggctcggcaaactgctgaaagagcattttcccgaggcagagatgatcgcgggcactgcaacggcgggcattccgcatgctgcgcttctcgcagaccgtgcaggcgcaccgatgtgctacgtcagaagcaaaccgaaagcgcacggcaaaggaaatcaaatagaaggcgccattaagaaaggacaaaaaacagtcgtgattgaagacttgatttctaccgggggcagcgtgcttgaagctgcagcggcccttcaaagagagggcgcggaagtcctcggcgtcatttccatttttacatacggactgccgaaagcaaaagaagcctttaaaaaagcgggtcttccttattactcgttaacggattatgacacgctgattgaagtcgcgcttgaaaacggaacgattcattcagatgacattgagaaactgaaatcatggaaacagaatcccgagtcagaagattggtttaaaaaataataacaataaaaacaggcctcagggcctgttttattattcctatcaaaaaactcgggttgacttctgttagaattgtgctaaaatttagtacaaatctaaaaagcttatcaagagcggctgagggactggaccgatgacgcccggcaacctgcgtgtcatgcaaggtgccgcatccagaaaaatgcacagcattttgaagataagggctataccgggtcactgtctttcattccgctggattgaaagttttttatatgaaaaaaagattgagggataagacaaccggcagaaaacaacagctgtttgattgtctccgggaggaggaaaggaaaaatgctaacgtatgacacatgggaagagccggcgattacatttccggaagacgattcctataaaggcgcgctgtctgttttaaaatgggcatacggccactacggagaccagcttgtttacgcgtgcagcttcgggattgagggcatcgtcctgatcgatttaatttctaaagtaaagaaagacgcggaaatcgtgtttcttgatacgggtcttcactttaaagaaacatatgaaacgatcgaaaaagtgaaagagcgttacccgggactgaacattatcctgaaaaagcccagccttactcttgaagaacaggccgaggctcacggagataaactgtgggaaagagaaccgaaccagtgctgctacatcagaaaaattctgccgttaagagaagcgctcgcagggcatccggcatggctgtccggccttcgccgggatcaaggaccgagccgggcgaatacgaatttcctgaataaagacgacaagtttcaatcgattaaagtatgcccgctgatccattggacatggaaagacatctggagatatacttccaagcatgagctggattacaatatcctccatgatcaagggtatccgagcatcggctgtgaaccgtgcacttcacctgcgtttaccgcggaagatttgcggagcggcagatggaacggcatggcgaaaacagaatgcggactgcatgaataaaggagctgcccgatggaattagccgctattttattctgcctgttttttgccatgaatatcggagccagcggggccgcggcttcaatgggagtcgcttacgggtccggcgccgttaaaaagaaaacgtatgcgctgatcatctgcgcggccggagttctgtcaggggcggttatcggcggcggtgaagtcgttaagacgatcagcggcggaatcattcccgaacaaaccattacgctcaccattgtctgcattattatcggatcggcggcgctatcgttattcacggcgaatgtgctcggcattccgctgtcgacgagtgaggtcactgtcggggcgattgtcggtgtcggcgtcgcgtacaaagtattgtttttacagcatcttttggtcatcgtgattttttgggtgctcgtaccgtttgtcgcgttctgtttcacgtttctcgtctcgaaggtattcagttctctgaatattcgagtcatttcgaatcggaaacagaagattttggggattgtgctgctgattgcggggttttgggaagctttttcagccggaatgaacaatgtcgcaaatgcggtgggccctttggttgctgcgggcgtgctcagcgtgtccaaaggaacgctgtacggaggcatctttgtcgctctcggcgctctgcttttaggacgtaaagtgcttgaaaccaacgggaaaaagattacgagattttcagccggagaaggcatactgctttccggaaccggcgcggggcttgtcattatcagttccgtcttcggtctgccggtcccattggcgcaagtcacatcatcatcaattatcggcatcggaatggccaaaaacgggccgaacgtttttcataaagaagtcgtgaaaacgatgctcaaagtatgggtcgtttctccgtttttgtcactgtcgatttcgtatttgcttgtctccctgctgttaaaaggagattactattccatctttatgatggccagcgtgcttttggcagctggcggagccgccagtctgatgaaagccatccgaaaagagaaacgctctgtccatgaacaaggcggaggcatttaactattaatctgagtttatttatctgttaactgggaggaatcatgtattatgagtttagcaccgcacggaggaacattaattaatcgggtgaatgagcagtatgatcttacatccgtccaaaaagaaattgagcttgatttgatttcgttcgctgatttagagctgatcgggatcggggggtacagcccgattgaaggatttttcacagaaaaagattacgtgtcagtcgttgagaatatgcgtctggcatccggggttgtctggtccctgccgatcacgcttacggtcgattcagaaaaagcggctgagcttgccgtcggcgacacggtgaaactgacttacggcggagacacatacggcgtagtcgacatcgaagatatttatacgccggataaacaaaaagaagccgttcacgtatataaaaccgatgatgccgcgcatccgggcgtgaaaaaattattttcacgcggcgatacgtatgtcggcgggccgatcacattagttaaaaaagcgtcaaagcagtttcccgagtttacatttgaacctgccgatacaagacgaagcttcgaagaaaagggctggaaaaccattgtcggtttccaaacgagaaatccggtccaccgcgcccacgaatatatccaaaaaaccgcgcttgagacggttgacggcctgtttttgaacccgctcgtcggtgaaacaaaatcagatgatattccggcggatgtcagaatggaaagctaccaggtgctgctcgatcattattatccgaaaaaccgcgttttcctcggcgtatttttggcggctatgcggtatgcggggccgagagaagccattttccacgcgcttgtccgcaaaaactacggctgcacgcattttatcgtcggccgcgatcatgccggcgtcggtgattactacggcacatatgaagcgcaagagctgtttgatcaatttacagcggatgaactcgggattacaccgatgaaattcgagcacagcttcttctgccggaaatgcggcaacatgggaacggccaaaacatgcccgcatgacagagaagaccacgtcattctgtcaggaacaaaggtcagagaaatgctgcgaagcggtgtcatgccgccggcggaattcagccgtcctgaagttgtcgaggtgttgattaaagggctgaaaacgaaagaagaagcaggcgtttcttaaggaggaaaatagagtgacaaatcgtgatatcgtgtggcatgaagcctcaataacgaaagaagaataccagcagaaaaacaagcataaaagctctatcctctggctgacgggcttaagcggttcagggaaatccacgattgcaaacgccgcagcgcgcgagctgtttgaacagggctatcaagtcatcgtgcttgatggtgataacatccgccacggcttaaacaatgacttaggtttttccgatgatgaccgcacggaaaatatacgccgcatcggggaagtggcgaagcttttcgttcagcagggaaccatcgtcatcacggcttttatttctccgttccgtgaggacagagatcaggtgagagagcttgtggcagagggcgaatttaatgaaatctacgtgaaatgcgacctcgatatatgtgaaaagcgcgatccgaaaggtttatataaaaaagcaagaaatggtgaaattccgttctttacggggatcgactcaccgtatgaagagccgaaagcgcctgagctcgtacttgattcaggcaaatgtgaacgcgaagaatgcaccggaagactggttgactttgtgaaaaacagcttagcataataggtccaaaaaggccgcgcaatcagccggatatcccccgcaatggcgggatatggtaaaatagctgaagtgcggcctcgcggctgttctgggaagatttcaaaacggatcggggagacatgctatggggaaagtatttatcgttggagccggtccgggagatccggacttattaacggtgaaggcaatgaaagccatacagaaagcggacgttatattatatgacagattggtaagcaaagagattttacagtatgccggagaagaagcggatctgatttactgcggcaagctcccggattttcacattatgaaacaggatacgatcaaccgtttccttgtgaagtatgcgaaaaaggggaaaaccgttgtaaggctcaagggaggcgacccgtttgttttcggccgcggaggcgaagaagcggaggctctcgcgcaaaacgccattccgtttgagatcgttcccggcattacatcaggaatcgcggctgctacttatgccggcattcccgtgacacacagagaggcgagctccaatgtcgcattcgttacggggcattataaacaagaagacgactttgaagaaaaatggaaagcgctggcgacgggcattgatacgctggtgatttatatgggagttaaaaatatccggcagattgaaagaatgctgctggaaaacggcagagacgccggcaccccggcagcctttattcattggggaacgacggacaggcaaaaaacagtcgtctgcaccgtcggcacgctttcagacacagtgataaaagaagaaatcaaaaacccgagcttaattgttatcggtgatgtcgtcaattatcactgcaaactggactggtatgcatctgaacagaaaaatctggatttgagcgaggcgttgtaaatgaagcaggcgattttatacatcgggcacggaagcaggctgaaaaaagcgcagacagagtcggcggcgtttttaaaagggtgcatgccgcacgctgacgctcccattcaggaaatctgttttttagaactgcaggaaccgtctattgaagcgggatttgaagcatgtgtcagacaaggcgccactcatattgcggccgtgcctttactgctgttgaccgctgcccacgcaaaacatgacattccggctgaaatcgctcgtgcggcggccctgcatcccgatataaaagtgacatatggtgttccgatcggagtggacgatgaagtcgtaaaagcggtgcatcatcgcattgaagataccggagtgcccattgagcaggcgaaagtggtgctgatcggaagaggaagcacagatccggcagttaaaaacgcagtcagtgagattgccggaaaacttgaggcgattacacctgttaaagaagtcatcccttgttttttaacagcatgtaacccgcactataaagaagtgtttgccggtcttgaagaggatgacggagcacccgtttttatcgttccatatcttctgtttaccgggcttttaatgactgagattgaacgggaagttcaaaagcttcaaacgatcaatcaaaatgttcatatcgcttcatacttaggttttcacccgcatattaagcaggcgttcttgaaccgtgtgtcagaagctgttcgaaaccccggcggtcagtttgattttaaggggggacagtatgctgcctctgcacattaatttaagcggaaaaagaattatcatcgcgggcggaggcaatgttgccttaagaaggctcaaaacggtgcttccggaaggcgcggatattactgtaatcagtcccgatgccctgcctgaaattaaacagcttgcggatgaaagacgtatccgctgggtttcccgtaaaattaaaatgaaggatcttgcgcccgcttttttcatcattgccgcgacaaatgaccggagcgtgaatcaggagatagccgcgagcgcttctgaaacgcagctggtcaattgtgcaagcgatgctgaacagggcagcgtgtatatgccgaagatcatccgcaaagggcgcattcaagtatccgtatcaacaagcggcgcaagcccggcacatacgaaaagactggctgaggacatagagcctctcattactgttgatttggctgaagaagtggatcgattatttgagaaaagaagaagaccataaaaaacaccttgtctgtcatcaggcaaggtattttttatactgtcctgacagtccccgaatgtgaacaattcaaaacgaaagcgggcagtttgaatggtatatgccagcaagcagtcaggattgcgaagtgatgcggaatatctatctgatcccaatgccgcctggattccgcccgcatacaaaggaacggtcagagacccggcatgattatattgactgcccggatgtgttcaggtttggcgaggggaaggtgacagtatccgccgccaaatcaggtgtgaccgctttaatcagagacggcccccggcggatcaggcagacatgacgggaaactgaccagatactgtaaagatcggttctgacggctggggagagtttcgtctccgtttataagtaattaaaaacacctccaagctgagtgcgggtttcagcttggaggtgcgtttattttttcagccgtatgacaaggtcggcatcaggtgtgacaaatacggtatgctggctgtcataggtgacaaatccgggctttgcgccgtttggctttttcacgtgtctgatttttgtataatcaaccggaacggagccggaatctttcgctttggaaaaataagcggcgatcgcagccgcctccagtatggattgttcatccggatcgctgcttttaatcacaacgtgggaacccggaatgtctttcgtgtggaaccataaatcatcccttgcggcagcttttgtcgttaagtactcattttgtttattgtttttgccgacaagaatcgtcaatccccgtgaagattcatattgctccaaaacaggaacgtgctgcttctgttttttctgtcctcgctgctgtttcggtcgcagatatttgccttccacaagctcctcccttatttcgtgaatatcctttgtggaggcggaggagagctgctggatcagctgatcgaaataagcgatttcctcctcggccagacggatctgttcttttaccacctcgatggaattcttcgccttttgatactttgtaaaatacatctgcgcgttttctgacggtgttttgttcggatttaaagggatggtcaccgtcttactttcttcatcataataattgatgacttccgcttctttgtcaccttttttcagcatatacaaatttgccgtcagcagttcgccgtatagctggaattccttcgcattttctgagtagtcgagcgtcttttccagcttttttatcttattggcgttctttttccgttcatttgcgacaaaccgctcgagatcctgagcctgctgtttgacgcggtcgcgttccgccttgccgaaataaaaccggtccaacagctcactcagagagtgaaaggtgcgctcctctccgtttacatgtgtgagagacaggagataaaagtattcctttccgccggctgtcgtaatgtttggtgtaaacctgcaatctttcacggcatggaacatttcaatcagcgtcttcggcagcgttattttgttagcgagacccgctctgtgcacggcttcttttgcaaaaagcggagaaacacctgagaagtgtctgacgatctgctggtcaagccgtccttcctgaaaactgagataacgcaaaacgtcctcttcatccgcggcaagcggcgaaattttttcctgagcgggaggaagcttgtaatcatatcccggcagaacggtccggtagctgttcatcgacggagataaatgcttcagtccgtcgatgatggctccttctccgtcagtcaggataatattgctgtgccgccccataatttcaacatacagcgttctgacggtttcgtcgccgatttcatttctgctttttatgcggaatatcataatccggtctaatccggcctgttctattttctcaataaatccgccttctatatgctttctgagcagcatacaaaacatcggcggctcgctcggattttcataggcctggtttgtcatgtgcacccgtgaatagctcggatgcgccgataataataatttatggttttttccgttagcgcggatatgaaatatcacatcgtgtttaaaaggctgatggactctcgtgatccggcctccggcgatccggctgtttaattcatgtgtcattccgtatgtaaacatgccatcaaaagacatataaaacaccctttccttcttcctgcattcgataattatagcatgaaaagggacgagtcagaataagcttgtttacagagtgacatctctaaagcgaggcaggggagtggacgagaagaatgaagtttcatgaaatgggacaaaccgatttgctgaaagcaacaaatacgtccattaaacaggggttgaccgaaaaagaggtgaaaaaacgccttgaaaagcacggaccgaacgagcttcaggagggcaagaggacaccggcgatcgccgtgtttttcgcccaatttaaagattttatggtgctcgtgctgctggcggcaaccttaatatccgggtttttaggcgaatatgtagatgccgtagcgattatggcgattgtatttgtcaatggggttctcggtttttttcaagagcggcgtgcggaaaagtctttacatgcattaaaagagctgtcaacgccgtatgtgtcagcgttgcgggacgggagctggaagaagattcagtccaaggagctcgttcccggcgatattatgaaattttcaagcggagaccggattggcgcggatgtgcggatcgttgaagcaaaaagccttgaaattgaggaatcggcgctgaccggggaatcaattccggtggttaaacaagctgataaactgagaaagccggatgtttcgttaggcgacatcagcaatatggcgtttatgggtacgattgtaacgcgcggcagcggtgtcggcgtcgtcgtcggtacaggaatgaatacggcaatggggaaaatcgccgatatgctggaatccgccggcagcctttcaacaccgctgcagcgaagacttgaagagctcggcaaaattttaattatcgtcgcgctccttttaacggtattggtcgttgcagtcggcgtcttacagggacatgatctttacagcatgtttttggccggggtgtcattggccgtcgccgcgattccggaagggcttcccgccattgttacggtggcattatcaatcggcgtccagcgcatgatcaaacaaaaatcaattgtcagaaagctcccggcggttgaaacattgggctgcgcctctgtcatttgttctgataaaaccggcacgctgacacaaaacaaaatgaccgtcacccatatgtggtcagcgggaaaaacatttaaagtgtcaggcatcggctatgagccggagggcgtgttcacccgagatgagcgggaaatcaagccgaaagatgagaagattcttgaacagatgctggttttcggcgcgttgtgcaacacctccgaaatcgcactgaaagacggccattatgtactcgacggcgatccgacagaaggagcgctgctgacggctgcaagaaagggcggttattcaaacgattggctcaacgggcactaccgcgtggttgccgagtttccgtttgactccgtccgcaaaatgatgaccgtcattgtagaggatcaggaaaaaaagcagttcgtcatcactaaaggagcgcccgatgtgctgattgaccgctcgtcacatctgatgcacggcgcaagaagtacgcctttttcagaagaaaagaaagcagaaacggaagcggttctgaaagagctggcgtcgcaagctttgcgtacgatcgcgattgcttataaaccgcttaagcccggagaaaagccgacaatggagcaggcggaaaaaaatctgacgatgctcggcttgtcaggcataattgatccgccccgtccggaggtcagacaggcgattaaagaatgccgtgaagccggcattaaaacggttatgatcacaggggatcacgtcgaaacggcaaaggccattgcaaaagatttgcgtcttcttccgaaaaaggggcgtgtgatggacggcaagacgctgaatgagcttacggagaaagaacttatcgaaacggtcgatgatgtctacgtcttcgcacgcgtgtcgcctgaacataaattgaaaatcgtcaaagcgttccaggaaaacggacacgtcgtcgccatgacgggagacggggttaatgacgcgccggccataaagcaggcagatatcggtgttgccatgggcgtgacgggaacggatgtggcaaaggaagcctcttctctcattctggtagatgataactttgctacgattaaatcagccataaaagagggacggaatatctatgaaaatataagaaaattcgtccggtatttgctcgcctccaacgtaggtgaaattttagtgatgctgtttgcgatgcttctcgctctgccgctgccgctcgttccgattcagatattgtgggtgaacttagtcactgacgggctgccggcgatggccctcggtatggatcagccggaaggagacctgatgaggcggaagccgcggcatccgaaagaaggagtgtttgcgagaaaactgggctggaaagtcgtatcaagagggtttttaatcggagctgcaaccattttagcgtttatcatcgtctatcaccgcaatcctgaaaatctgccctacgcacagaccgttgcattcgcgactcttgtcctggctcagcttatacacgtgtttgactgccggagcgaaacgtctgttttctcccggaatccgtttgaaaatatctatctgctcggggccatcatttcttctatcttcctgatggtcatcgtcatctattatccgccgctgcagccgattttcaaaacagtgccgattacgccgggcgattggatgctgattatcggtatgtcgggcatacctacttttttgctggcgggttcacttttgacaagaaaaaaataattccatatgatataatcttaggggtaatagcatgtctattgcccttttattttgataacgggaaagaattgggtgtttcatatgatacggagtatgacaggcttcggcagcgcaagcagcacaaaaggcgatctctcggcaaccgttgaattgaaatccgtcaattaccggttcaaagaagtgaacgcccgcctgccacggcctttgctatatgtagaggataagctgaaacaaacgatattgcagcatatacagcgcggaagagtagagctgtttctcactgtaaacagtgacgcgctcataaaaagaagcctgaacatcgattgggagctccttgatgaatatgtgagcgccgcacgcgtcatgaaagagcgctacagcctggccgcagaacccgatgcaatggagttctttaaagttgaacatattgcgcagatacacgaagaacagatgcgtgatgacaagcttgaagaagtcatcagggaagccgctgagctggctgtaaaggaactttgtgacatgagagaaaaagaaggacggcttttggcggaagactgctttctgcacattgagcggcttgagacgctgtccgaacaggtgaaagagcgcgcttcggccgttgttattcaataccgcgagcgtctttacgcccgaatgaaggaatggacggaggatgcgctcgacgaaagcaggctgatcacggaatgcgccattttcgccgatcgttctgatataacggaagaaattaccaggttgaagagccattttgttcaattccgtgatatattaaaagaaggcggggcagtcggccgcaaacttgatttccttgttcaggagcttaaccgagaagcgaatacgatcggctcaaaagccaatgatcatcaaatcacaaagcttgtcgttgaaatgaaaagttctattgaaaaattgaaggaacaagtgcaaaatatagaatagcgactgtgcgtattgtttacagacggcctcttcaggttacactagagacgtctattttacagggggaacgtagaagatgacgattaaactgattaatatcggatttggcaatatcatctccgccaatcggatgatttcgattgtcagcccggagtctgcgccaataaagcgaatgatccaggatgcaagagaccgcggaatgctaatagacgctacatacggacgaagaacccgtgcagttgtcgtcatggatagtgatcacattatcttatctgccgtccagcctgagacagttgcacacagactttctgtgaaagaagaaattatggatgaagggcaggggtaattgccgcatgaaagaaagagggttattaatcgttctctcaggtccctccggagttggaaaaggaacggttcggcaagcaatattttcacaacaggacacgaaatttgaatactcaatttcagtcacgacgagaaacccgagagagggcgaagtcgatggcgtcgattatttctttaaatctagagatgaattcgaacgcatgattgaaaacaacaaactgcttgagtgggcggaatatgtcggcaactattacggaacgcccgttgattatgtcgaacagacgcttcaagaaggaaaagacgtcttcttagagattgaagtgcagggcgcgctccaagtgcggaatgcatttccggaaggcctgtttatcttcttagcgccgccgagtctttctgagctgaaaaacagaatcgtgacaagagggactgaaaccgacgatttaatcgaaaacagaatgaatgccgcaaaagctgaaatcgaaatgatggacgcgtatgattatgtcgttgaaaacgacgatatccaaacggcttgtgataagattaacgcaatcgttctcgccgagcacttaaaacgtgaacgcgtcgctccgagatataagaaaatgctggaggtagaataacttatgttagatccgtcaattgactctttaatgaataaattagattctaaatatacgctggtgaccgtgtctgcaagacgcgcgcgtgaaatgcagatcaaaaaggaccagcagattgaacataccatttctcacaaatatgtaggcaaagctttagaagaaatagacgcgggcctgctttcgtttgaaagagaagacagcgaataacaagcacacgtagcaacctatctctacataggttgttatttttttccgtttgggatttgtccaatgctttcataaaggggagaagacttcatgaaaaaccgaaacattttgctatgcgtaagcggaggaattgccgtttataaagcttccgcactcacgagcaagctggttcaggccggcgcaaacgtcaaagtgattatgactgagtccgcgcgtgagtttgtttctccgctgacatttcaggcgctgagccggaatgaagtatatacagatacatttaatgaacaaaatccgaaggtgatatctcatattgatgccgctgactgggcggatttaattattgtcgcgcccgctacggcaaatatcatcggcaagcttgccaacggaattgctgacgatatgctcacaacgacggtgctggcggctgaggccccggtttgggtggcgcctgcgatgaatgtccatatgtatgatcatccggcggtgaaacggaacatctctgtgctttatcaggacggggtccgctttatcgagccgagtgaaggctatttggcatgcggatatgtcggcaaaggaaggctggaggagccggagcttattgttgagcgtgtcagagagcattttaaggagcctgaagacgatgcgccgctgaaaggaaaacatattgtcattacggccggtccgacgcgcgaagccgtggaccctgtccgcttcttcacaaataaatccaccggcaaaatgggctacgccgctgctgaagccgccgtctgtctcggggcgcgggtgacgctgatttcaggcccggtgtcaatagagccgccaatcgggctgtatcagtttcttcctgtgcaatcggcagctgatatgagagaagcggtgctttctgtgtttgattcatgcgacatggtgattaagacggcggccgtggccgattttacgccagcggctgtttctgatcacaaaatgaagaagaaagacggttcgctcgtgatcgaattcaaccgtacggcagacatactgaaagaactcggcgaacggaaaacacaccagctgctggtcggatttgcggctgaaacgcaagacgtcgaacgctatgcgcgcagaaaacttgaacagaaaaaccttgatatgatcgttgcaaatgatgtgaaagcagaaggggccggatttggcacggatacgaatgtcgtcaccttctatttccgggacggaagaaaacgggagcttgcgcttatgtctaaacttgacgtttcctttgaaatgctgaaggaaatgaccgctttgaaagccgaggaccgaaaacccgtatgaatgtagcagaagtcattgtcgatgtcagctccaaaaacattgacagaccctttgattacaaaattcccgatcatttaaaagggatgatcgaagtcggcatgcgggtgattgtcccgtttggcccgcgcaagcttcaaggatttgtgaccggtttgaaagattcgtctgaattaaacggcggctcaatgaaggaagtcgagaagcttcttgatttgacgcccgttctgactgaggaactgatgcagctgtcttcatggctttctgacaaaacgctgtcgtttaaaatcacggcgcttcaggcaatgctgcccgccgcactgaaggcgaagtacgagaaagagctgaaagtcgttgacgaagaagcgctgacaccggacatcaaacagcttttcaggaatcaaaaaagtcttctgtactcggatattaccgatgaaagcattctttcgtcacttcaaaaattcgtgcgcaaaggaagcattgatgtcacatataaagtcgcccaaaaaacgaataaaaaaatgatccgcatgatcgaagcgggggcagacaaagaagaactcgcccggcacgcagattcattgacaaagcaggcttctaaacagctcgccgtgcttacttattttatcggcgggggagcaaagatttccgcggctgagctttgcaaaaagaccgattccagttccgcgacgctgaaaacgcttcttaaaaaggggcttcttacggaaagctttgaggaggtttaccgcgatccttatcaggacagaatgttcaaaaaaacagagccgctctctcttacagaagagcagcaggccgcttttgagccgattaaacaagccgtagccgatcatgtccaccacgtctttctgcttcacggcgtcacgggaagcggcaaaacggaaatttacctgcaatccattgagaaagtgctggcaaaaggacaagaagccatcgtgctcgttccggaaatctcgttgacaccgcaaatggtcaaccgttttaaaggccgcttcggctcacaggttgcggtcatgcacagcggattatccacaggtgaaaaatacgatgaatggcggaagattcagcgcaaggaagtccggcttgtcgtcggagccagatcggccatctttgccccgtttgaaaatctcggcatgatcattattgatgaagagcacgaatcttcctataagcaggaggaaatgccgcggtatcatgcaaaggacgtagccatccgccgggccgagcatcacagctgtccggtcgtcctcgggagcgccacgccgacattagagtcatttgcgcgggcgaaaaaaggcatttatgagctgcttccgttaaaacatcgcgtaaatcgccagctcatgcctgacgtttctctcgttgatatgagagaagaactgagaaacggcaacagatcaatgttttcaagagaactgatggaacagctggaagagaagcttgcaaaaaaagagcaggccgtcctttttctgaataaacgggggtattcctcgtttgtgatgtgccgggactgcgggtatgtgccgcaatgtccgcattgcgacatttcgatgacttatcaccgctacggacaaaggctgaaatgccattactgcggccatgaggaacctgtcccgggaacatgcccggaatgcggcagcgaacatatccgctttttcggcacgggcacgcagcgtgtggaggaggagcttaccaaagtgctgcctcaggcgcgcgtgatcaggatggatgtggacaccacttcaagaaaaggcgcccatgaaaaactgttgtcagcgttcggtgaagggaaggcggatatcctgctcggcacgcaaatgatcgcaaaagggcttgattttccgaacgtgacgctcgtcggagtattaagcgcagatacgacgcttcacatccctgatttcagggccgcggagaagacattccagctgctgacgcaggtaagcggacgggccgggcggcatgaaaagctgggaacggtggtcattcaaacgtatacaccgtctcattacagcattcagctgacgaaaacgcacgactatgaaactttttttcagcaggaaatggcgcacagaagggcccagtcatacccgccttattattacgtggcgctggtgaccgtttctcatgaagaagcggcaaaagccgcggtcaccgcagaaaagattacaaactatttaagagcgggatgcgggcctgatacgaaaattctcgggccggcggcttccccgatcgccaggatcaaagatagatatcgctatcaatgcgtgataaaatacagacaggaaaacgagttgcagattcagttgaaaaagatactggagcactataaacgcgacattgcgcaaaagcatgtcatgatttcaatcgatatgaatccgtacatgctgatgtaacattagtttttggagggcaaaattttggctgtgaaaaaaatcgtcacacatccggcggaggttctggaaacaccagccgatgaagtgacagtgtttgataaaaaattaaaaaaactgcttgacgatatgtacgatacgatgctcgaaatggatggcgtcggtctcgccgcgccgcaaatcggcattttaaaaagagcggccgtcgtggacatcggtgaagaaagcggccggatcgaccttgtaaatccggttattcttgaaaagagcggtgaacagaccggagtcgagggctgcttaagctttccaggggtttacggcgatgtcacccgcccggattacgtaaaggtaaaagcctatgaccgtaaaggaaaaccgtttattttagaagcggagggttttttggccagagccgttcagcatgaaatggatcatttagacggcattttattcacatcaaaaattacggcttactacactgaagaagaactggcagaaatggaaggatgattggatgacaaggatcgtttttatgggaacgcccgatttttcagttcccgtcctgcgcatgcttattgaagacgggtatgaagtggttggtgtcgttacgcagcctgaccgcccgaaaggcagaaaaaaaatcatgacgccccctcctgttaaggctgaagctgaacgtcacggcattcccgtgcttcagcccgaaaaagtaaggctcgaagaagaaatagaaaaagtgctcagcctgaagccggacctgattgttacggcggcattcggacagatcctgcccaagcagctgctggacggcccgaaatacggctgtatcaacgtacacgcgtcactattgcctgaattaagaggcggagcgccgatacattattcgattctccaaggcaagaagaaaacgggcgtgacaatcatgtatatggttgaaaagcttgatgcgggcgatatgatttcgaaaatcgaagtggagattgatgaaaaggataacgtcggcacgcttcacgacaaattaagcatagcgggggcaaagcttttgtcagagaccgtcccgaacgtcatttccgcaaatattaaaccgatcaaacaggacgaatcaaaagcgacttacgcgcctaacattaagcgtgagcaggagcggattgattgggcaaagcccggagaagagatttacaaccagatcagaggtttaaacccttggcctgtcgcctatacaactttgaacggtcaaaatatgaaagtatgggcttctgaaaaagttgcggcaaaaactgaagctgcgcccggaacagtcatccgcacggagcaaaacggcattgtcgtcgcatcaggaaacagcaccgcccttttaatcactgaactgcagccggcgggaaaaaaacggatgaagggcgaagattttgtaagaggcaaaaatgtgcagcccggtgacgtgttaggagaagcaaatgaagaaaattaatgtccgggagctcgcccttgaagcgcttgagaagcttgagcaaaatcaggcatacagcaacctgcttcttacctcggttatcaaaacgaacacgctcagcgatcaggacagaggactgctgacagagcttgtctacggaacgctgcaaaataaaatcgccttagactacatgctgaagccttttatccgcaagccgaataaagtgaagccatgggtgattcagctgcttcgtctgtccgcgtatcaaatggagtatttagaaaaaataccggatcgcgccgccattcatgaagcggttgagatcgccaaaaaacgcgggcataagggcattgcgtcctttgtcaacggcatcctccgctccctgcagcgtgaaggggcgccgtcattcgctgaaattgaagacccggttctccgtctttctacagagacaagccatcccgaatggctcgtaaaagagtgggtcgtggcgtacggctttgaggcagctgaaaagatctgccggattcatctcattccgccgaagcagacgctccgtgtcaatcacataaagagcgacagggaaacggtgctgaatgagatggagaatgccggtctggaagcggaagccggagacctttctcctgatgcgattaagcttttgaaaggaagcatcgcgaacacggcatttttccaaaacggccgggtatccatacaggatgaaagctcaatgcttgtcgcgcgggcgctggacccgaagccgggcgaaaccgttttagatgcatgcgccgcaccgggcggaaagtcggctcacattgcggaactgatggagaacgaggggagcctcacatcacttgatcttcaccgccataaagtaaagctgattaaagagggcgcagaacggctcggacttacgatcatcgacgcgcaaacgatggatgcgcgaaaagcgggagaggcctttggcgcagaacggtttgaccgtattctcgttgatgccccttgctcaggtttcggcgtcatcagaagaaaacccgatatgaaatatacgaagacgccggaggacagcagacggctgtcagaaatccagctcggcattttaagggaaatcgccccattagtaaaaaaaggtggcacactcgtatacagtacgtgtacaatggaccggacagaaaatgaagaagttatgcatgcgtttatacaagaacaccctgagtttgaacccgatttgtctcttgaaaagcggctgcctgaaaaggcgagaccctttgttcaggatggaagccttcaaattcttccgcattatttcggaacagacggtttctttattagcagcatgagaaagaagggataaaaaatgacacaattaaaaaagacaagcgtacggaaagagctgcggactgagcagccgtccatttactcttttgaattagatgaaatcaaacaatggctgaccgagaatggcgaaaagccgttccgcgcagcacagatttttgaatggctttatgagaagcgggtttcttcatttgatgaaatgacaaacctctcaaaaagcctgcgtgaaaaactcgagagccattttgtgctgacaacgctgaaaacggctgtaaaacagacatctcaagacggcacgatgaaatttttatttgagcttcatgacggttatacgatcgaaacggttttaatgagacacgagtatggtaattctgtatgtgtaacgacacaggtcggctgccggatcggctgcacattttgcgcgtcaacgctcggcggactgaaacggaatcttgaagcgggagaaatcgtcgctcaagtcgtgaaagtgcaaaaggcgcttgatgaaacggatgaacgcgtcagctcagtcgtcatcatgggaatcggagagccgtttgataatttcaatgaaatgctcgctttcttaaaaatcattaaccacgataaagggctgaacatcggagcgcgtcatatcacagtttccaccagcggaatcattccgaagatttacgatttcgccgatcaaaaaatgcagatcaatttcgcgatttctctgcatgctccgaatacggaaatcagaagccgtctgatgccgattaacaaagcctataagcttcctgaccttatggaggccgtcaaatattacatcgagaaaacaggcagacggatcagctttgaatacgggctgttcggcggcgtaaatgatcaggtcgaacacgcagaagagcttgcagaactgttaaaagacgtgaaatgccatgtcaatttaattccggtaaactatgtgcctgaacgggattacgtccgcacaccgagagatcagattttcgcattcgaaaaaacgttaaaatcccgcggtgtaaatgtcacgatcagaagagagcaaggccatgacattgacgcggcctgcggtcagcttcgcgcgaaggagcgtcaagacgagacgaggtgaagaggttgattacagccttgaaaacagatacaggtaaagtccgccggcataatgaagatgcggcgggcattttcacaaaagaagacgcggtgcttgcggttgtcgccgacggcatgggcggtcatcttgccggagatgtagcgagcaggatggcggttgcggcgatggaagagcagtggaaccggaccgaaatggttccatctctgccgtctgcttgcgagaattggctgaaagaccggattcatgaggcgaatgtcaaagtacatgaccacgctaaagcgaatgaagaatgccggggaatgggcaccactgttgtttgcgccttattcaccgggaagtttgtcactgtggctcatatcggtgacagccggtgctacctgcttcaagagggggaattcactcagctgactgaagaccattcgcttgtgaatgagctggtcaagacgggggaaatttcgaaagaggacgccgagcgccatccgcggaaaaatgtattgacgagagcgctggggacagatgaaaccatcagtcccgacgcccgttcttttgaactgtctgacggcgatcagctgcttttatgctctgacggactgtcaaataaaatagaagatcacgagatcaaacaaatgcttcaagccgaatctgatcctcaggaaaaagtagaccttctcatcagcaaagcgaatcaaaacggcggcgaagataacatcacggctgtgttgattgagttttccgcagatgcaaaagagggtgaagacaagtgctaaccggcaagcggatcagcgggcgttatcatatcctccggcctattggcggcggcggaatggcaaacgtttttttagctgaggacatcattctcgaacgtgaagtcgcaattaaaattctgcggtttgactttgtgaatgacattgattttatcaggcgtttcagaagagaagcacagtcggcatcaagcctcgatcatccgaatatcgtcagtatttacgatatcggggaggaaggcgatatttattacattgtcatggaatatgtggaaggcatgacattaaaggaatacataaacgcacacggaccgcttcatccgaaagaagcgctgtccgttatggagcagatcgtctcggccatcgcccatgcccatcaaaaccatatcgtgcaccgggatattaaaccgcacaatatattgatagatcatttagggcatatcaaggtgacggatttcggcatcgccacagcgcttacgtctacgacaatcacacatacgaattctgtgctgggctcggttcattatttgtctccggagcaggcgagaggcggtctggcaacgaaaaaatcagatatttacgcgctcggcatcgtgctgtttgagcttttaacaggtaaaattccttttgacggagaatcagccgtcagcatagcgctaaagcatctgcaaacagaaacgccttccgccagaaagtggaacccttccattccgcagagcgtcgaaaacattattttaaaggcaaccgctaaagacccgtttcaccgctatgaaagcgccgaggacatggaagcggacatcagaacggcttttgacgccgacaggctgaatgaacaaaaattttccgtgcaggatgatgaggaaatgacaaaagccattcccgttattactgacggcgcaaaagccgcgcctcaggcggaaacgccgggggagacggatgataaggaacagcagcccgccaaaaagaaaaaacggaaatggccgtgggttttgctggccgtctgtttcattttcattatggcagctgttcttgcggtcaccgtgtttccgtctttatttatgcctaaagatgtaagcgtccccgatgtacggggcatgaagtacgaaaaagcggaagccctgcttgaaaagaacgggctccgggcggatcctgatataacggatattgaagatgaaaaaatagaagaggaattaatggtcaaaacggacccaaaagcggggtctaccgttaaagaaggctcttctgtaaaactgtacaaaagcatcggaaaaccgaaaacccagctgatcgacgtgaaaggaaggcagatcggcgacgcaaaaaaatcgctgaaggaaaaaggcttcaaacatgtcaatgtcaaagaagagaacgatgacagcgaggccggcaccgtaattgatcagaacccgtcagccggcaccgacatggtcgcaagcgacgatgaagtcaatctaacggtcagcctcggcccggcggacgttacgctgagggacttaaagacttacagcaaagaagcggcttcagggtatcttgaagataacggcctgcagcttgttgaaaaacaagcccattcagatgacgtgccggaaggacaagtcatgaagcaagagccggcagccggcactgcggttaagccgggaagtaatgttgaagtgacgttctcgctcggacctgaagaaaaaccggcgaaaacggtaaaagaaaaaatcagcattccttacgaacccgaacatgaaggggacgagcttgaagtgcaaatcgccatcgatgataaggaccacagcatctctgatacgtatgactcatttaaaataaaagagccgactgaaaaaacaattgaactgaagattgatcagggacagaaggggtattatcaagtgatggtcgatcataaagtcgtcagctacaaaacgattgaatacccgaaagataatgactgacaaggagggaccctatgcctgagggcaaaattataaaagcgttaagcggattctattatgtcttggatgaatcacaggacaagatcattcaatgcaggggccggggcattttcagaaaaaataaaataacgcccctggtcggcgattatgccgtttatcaggctgaaaatgataaagaaggctacctgctggaaatcaaagaacgaacaaacgagctgatcaggccgccgatttcaaatgtcgatcaggccgttctcgtcttttctgccgttcagccggcgttcagcacgtctttattggaccgttttctcgtccttgtggaagccaacggcattcacccgatcatctgcataaccaaaatggacttagctgcagacggggaatcgaaagaggcgatactttcttacgtgaaagactatcaggcgatcggttatgacgtatatgtgacgtcatcaaaagagaacagcggcttaacaggcattgtgaaacacttcgagaacaaaacaacggtgtttgccggtcagtccggagtcggaaaatcttcgcttttaaatgcgatcagcccggagcttgagctgaaaacaaacgagatttccacgcatttgggacgcggaaaacatacgacgcgccatgtggagctcattcatacatcaggcggtctggttgcggatactccggggttcagttcgcttgaatttaccggcattgaggaagaagagctgggcagcacgttccctgagatcagagaaataagcgcctcttgcaaattcagaggctgtctgcatcttaaagagccgaaatgcgcggtaaagcaagcggtggaagaaggagagattcagccgtaccgctatgagcattacaaagaatttatgcaggaaataaaagagagaaagccgaggtattaatatgattaaggttgcgccatcaattctttccgccgattttgcttcactgggcgaggaaattaaagacgtggaaaaaggaggggcggactatatccatattgatgtcatggatggccatttcgtccctaacattacaatcgggccgcttatcgttgaagccgtccgtccggtgactgatctgccgctggatgtccatcttatgattgaaaacccggaccgctacatcccggcattcgcaaaagccggcgcggacatcctttccgttcatgctgaagcgtgtccgcatcttcaccggaccattcaattgataaaagagcaaggggtaaaagcgggagttgtgctcaatccgcatacgcccgtccaaatgattgaacatgtgatcgaggagcttgaccttgtgctgttaatgacggttaaccccggttttggcggacagcgcttcattcattcggttctgccgaaaatccgtcaggtcaaacagctggctgaggagaaaggcctgtctgagcttttaatcgaggtggacggaggcgttaataaagaaacagcccctttatgcgctgaagcgggcgccaatctgcttgttgccgggtctgccgtatataatcagccggatcggaaaaaagccatcgctgacatccgaaacgcatcataaacatgctgaaaaagagcccggtgaaagccgccggctcttttcgcgtctaagagagaggataacatatgaatacaatcaatatcgttgcgggaggcccgcgggagcttattcccgatctatccgaatacacagccggagatacgacgtgggtcggagtcgataaagggacggttgctcttttggaggccggaatcattccgcaggaagctttcggtgattttgacagcactacggaagaggagctcatgcagattcaaaaagcagcgccggccctccatgtgtatcaggcggaaaaagattataccgatcttgaactcgcccttgactgggctttacaaaaagaaccggaaaccattcggatattcggtgtgacgggcggaagagccgatcactttttagggaacatccagctgctgtataaagccttacataagaataccgatgtcgtgctgatcgaccggcagaatgacattcagatgttcgggcccggccgttatacaattgaagaaaaagcgcgcagacgctatatttctttcattccgtttacggaagcggcagacggcctgacactcgacggttttaaatatccccttgataattgtcatattcctgtgggttccacactatgtattagtaacgaactcattcattcacgaggtactttttcgtttgcaaaaggcatattaataatggtaaggagcgcggattagaaaagcggcttctgccatatgcggaaaaaaccatgaatcctaaagtgatgaacgcagcggatacgggacttataggaggggacaaaatgaaattttataccattaaattgccgaagtttttaggaggaattgtccgggcgatgctgggctcatttagaaaagagtaagcccaagaagctgaaattgccctctttgaacgcataaaaaacgcctgccgcataaaagggcaggcgttcatttttgcttatacacgctcaactttaccggattttaaagcccgggcagatacatatacttttttaggtttgccgtcaacgaggatgcggaccttttgaaggttggcgccccaagtacgcttagaagcgttcattgcgtgagaacggttgtttccggcttttgtttttttacctgtaataaaacatttacgtgccatttgtttccctcctaactgcgcgaaacatcttttcaaacatagtgtctcagatgctttcgttatacaatactttaaataatttaccacagctaaaaaccgtttgcaactattgtttcccttactttcaagaaaaatcacttgacatgtaaaaccaatcacatttccgcgctgaaggccgctgtctgtatcttttcttttcataatgggatacatatagtagaataatgataactctatgcatctgaaggaggaacctgtgtgtccattgaaatgaagacaaaatacggacagattgatatatccaacgaagtcatcgcaatggttgccggaggcgctgccattgactgttacggaatagtggggatggcctcaaaaaaccagattaaagacggtttgtctgaaatcctccggagagagaacttcgcaaaaggcgtacatgtccgtcaggaagccgaacaaatacatatcgacatgtacattattgtcagctacggcactaaaatatccgaagtagcccacaatgttcagacgaaggtaaaatacacagtaaatcaaacaatcggacttgcagttgattctgtaaatatttatgtccaaggcgtacgagtaacgaacccgtagtgaggaggatgagtattgtctagacgaaacttagatgggagagcttttgcggcaatgattctggcgggggctgagacattgtctcaaaacgcatccgcggtggatgcgctgaacgtgtttcccgtgcctgacggcgacaccggaacaaatatgaatttatcgatgtcatccggtgcaagagaggtagagcacattgactcacccgacatcggcaaagtcggcatcgccttgtcaaaaggcctgcttatgggagcgagaggaaactcaggggtgatcttgtcccaattgttcagaggtttcacaaagagcattgaaaacaaaaaccaaatagacgcccaagaatttgccgcagcactccaagcgggagtggatatggcatataaggcggtcatgaaaccggttgaaggaacgattttaaccgtggccaaggatgcggctaaaaaagcggtcgcctcggccaaagaagaaaccgatatcattgctctcatggaggccgttattgaagaagcggaagcgtcgctgaaccgcacgccggatctgcttcctgttttaaaggacgtcggtgtcgttgacagcggcggaaaaggtctgctttgtgtatatgaaggctttttggctgctttaaaaggagaggccgtaccgaaaaaagcggttcttccggcactcgatgatatggtgaatgccgagcatcataaaagcgcgcagagcatgctgagtacagaagacattgaattcggattttgtacggaagtgatggtgaggctggatcaagataaacggacgttcaaggaagagacgttcagaaacgaactgagccgtttcggcgattcattgctggtcgtggctgatgatacgctggcgaaagttcatattcatgccgaagaaccagggaacgtactcaatctcgcacagcgttacggcgatttgattaaaattaaaattgaaaacatgagggaacagcatacttcaatcatcagccaagaacatgatgaaaaaaagccggccggcgttatgaaagaagcccgcaagccttttggcatcgtgactgtggcaatgggagagggcatttctgaattgtttacgagcatcggcgcttcacacgtaatcgaaggcggccagacaatgaatccgagcacggaagatattgttgaagccgttcagtctgtcaatgcggagacggttttcattcttccgaacaattccaatattgtgatggctgccaatcaggcggcgagcgtggctgaagaaaatgtcattgtcattccggcaaaaacggtccctcaaggcatgaccgccctgcttgcgtttaaccctgaccagccggctgacgtaaatgaagccaatatgcttgaggccatccggaatgtgaaaagcggacaggtgacatattcagtcagagacacccatatcgacggcaaggatattaaaaaaggtgattttatcggcattttaaacagttcaattatcggcagcgccgaagatcggataagcgcggcgaaattgctgctggatgaaatgatcgggaaagaagatgaaatcgtcaccatcttgtacggagaggacgcgccggaagaagaagctgagaaactcgctgagtatattgctagcgtctgtgaagatatcgaggttgaaatccataacggcagacagcctctgtatccatatatatttgcggcagaatagaagggcttatcaggcccttctattcttatgcctttatttacctgcggcagtgcggcagtgtgcctgcttgccaattgagaaatgttcaattagtctaaagaaaagcgctgaatgaagtgatgttaaggaggaacaaaccagcatgaagtatagaagcgtttttgatattatcggcccggtaatgatcggtccgtccagttcacataccgcaggcgccgcccggatcggcagagtggccagaagcttattcaggcgggagccccgccggatcgttgtgtctttttacggatcatttgcggagacgtataagggtcacggcactgatgtcgcgattatcggcggcctgcttgattttgatacatttgatgaacggattaaaacagcgattcaaattgcggaagagaagggcatatatgtagagttccgtacagaggatgccgtgcccgttcatccgaatacagcgcgcatcgtcatttctgatgatgagggagagcttgcccttaccggtatttccatcggcggcggaaaaatagaaatcacggagctcaacggctttgagctgcgtctttccggaaaccatccggctattttagtcgttcacaatgataaattcggcacgattgcaggcgttgccaatgtgcttgcgaaattctccatcaacgtcggacatatggaagtggcgcgtaaggacgtcggccagcttgcgctgatgacgattgaggtcgatcagaatattgaagaagaagtgcttgacgagctttcaacacttcctaatattatacaggttactaagatagctgactaaaaagtcaggaggaaaatgacatgtttcgtaatgtaaaagaattaatagaaatcactcaagaaaaacaaattccgatttcggaagtgatgatcacccaagagatggaagtgacgcaaaaaacgcgggaagaaatctttcaaggaatggagcgcaatctctccgtcatggaagcagctgttgaaaaagggctgaagggcgtcacgagtcagaccggtttaacaggcggagatgccgtgaaacttcaggcatatatccaatcgggaagaagcctgtcgggcaatctgattttagacgccgtttctaaagctgtggcgacaaatgaagtcaatgcggcgatgggaacgatctgcgctacaccgaccgccggctctgccggggtcgtgccgggaacgttattcgccgtaaagcataagctgcaccctacgacagaacaaatgatccgttttctgtttacagccggcgcgttcggttttgtcgtagcaaataatgcgagtatttcaggagcggcaggaggctgtcaggcggaagtcgggtcagcatcaggcatggcagcggctgcgattgtggaaatggcgggcggaacgcctcagcaatcagcggaagcaatggcgattacactgaaaaatatgctcggtctcgtatgtgacccggtcgccggattggtagaagtgccgtgtgtcaaacgaaacgcaatgggagcatccaacgcaatgatcgcggcggatatggcgctggccgggattacaagccgcattccttgcgatgaggtgattgacgcgatgtacaaaatcggccagacaatgccgacagcactgcgagaaacgggacaaggcggtttagccgcgacaccgacgggaagagaattagagaaaaaaattttcggaggagcgctgaaatcaagtgacacaccatcagcaaactagtatagcggaaattaagggcattgggccggaaacagaaaaaacattgcacgaacttggtatctatgacatttctgatcttctgaattatttcccttaccgttatgacgactatgagctgagggatttagaggaagtaaaacatgaagaaagagtgacggtagaagggaaggttcattcagaaccttctcttacctattacggcaaaaaacgaaacaggctgacattcagggtgcttgtcggcaattatttaattaccgcggtctgctttaaccgtccctatttaaaaaagaaactgacgttaggttctgtcgtcacgatatccgggaaatgggacaaacacagacagaccgtttccgtgcaggaattaaataacggtcctcatcaagaagataaaagcattgagcctgtttattccgttaaagaaaacgtcaccgtaaaaatgatgagacggtttattaaggaagcgctgcagcatcatttggacagtgcggccgatccgcttcctgaaaaattgagaatccgctacaagctgcctgattataaacatgccctgcagacgatgcatcagcctgaaacgagggaatcgttacagcaggcaagacgccggtttgtttacgaagaattcttattatttcagctgaaaatgcaggcgttccgtaaagcggaaagggaacagtcaaaaggcatcagccatgtgtttcctgctgaaaagctcgccgctttcacagacagcctgccgttttcgctcacgaccgcacagacgcgtgtgcttcgggaaattaccgctgatatgacatccccttaccgaatgaaccgtctgctgcaaggtgatgtcggatcagggaaaacggccgtcgccgccatcgctttgtacgctgcgattttgtcggggtatcagggggcattaatggtgccgactgaaattttggccgaacagcatgcagattctctcgtatcgttgtttgcaaatgaagatgtaaatatcgcgcttttgacaagttctgtcaaaggaaagcggcgcagggagcttttggagcggcttgctctcggagagattgatattttagtagggacccatgctttaatccaggatgaagtggaatttaaagcgctgagctttgttattacggacgagcagcaccggttcggggtcgaacagcgcaaaaaactcaagaataaaggtcaggatccggatgtgctgtttatgacagccaccccgattccgagaacgctggccattaccgtcttcggagaaatggatgtttccgtaatagatgaaatgcccgcggggcgaaaacaaatcgaaacgtattgggtgaaacacgacatgctggagcggattttggcttttatagaaaaagagctgaagcagggaaggcaagcctatattatctgcccgctcattgaagagtcggataaactggatgtacagaatgcgattgacgtatataacatgctgtctgacgtttaccgcggtaaatggaatgtcggcctgatgcacgggaagctccattctgatgaaaaagatcaggtgatgagagaattcagcgccaatcaatgtcaggtacttgtatcaacaaccgtcgtagaagtcggcgtgaacgtgccgaatgcgacgattatggtcatctatgacgccgaccgtttcgggttatctcagctccatcagctccgcggccgggtcgggcggggagaccaccaatctttctgcatcttgatggcagatccgaaatccgaaaccgggaaggaacggatgagaatcatgtcggagacaaacgacggcttcgagctgtctgaaaaggaccttgaactgcgcggccccggtgatttcttcggaaaaaaacagagcggtatgcccgagttcaaggtggcggatatggttcatgactacagagctttggaaacggcccgccaggatgcggccaatctggtgtcttcagaggcgttttggaaagatgacgaataccgcatgctgcgcggtcaattactttcaagcggcgtcctggaaggggagaaattaagctgattctgcaaaattcggcggctttcaaaaaacaatcattgcattccaatctatgagattatatactactattagtacctagtcttaattgtccggatggtgtttacagatgagaagaagcaagaaagaacgccaaaaattattgcagcagacgatcaaatcgacacccttcatcacagatgaagaattagcggggaaattcggcgtcagcattcagacgatccgtttagaccgcttagagctctcaataccggagctgagggaaagaattaaaaacgtggcagaacaaacgcttgatgatgaagtgaaatcactgtcgttagacgaagtgatcggtgaaattattgatctggagcttgacggccaggccatttccatattagaagtaagacgcgaacatgtcttcagccgcaatcaaattgcgcgggggcatcatttgtttgcgcaggcgaactcactcgccgtagccgtcattgatgatgagctggcgctgaccgcaagcgcaaatatccgctttacaagacaggtgaaagaaggcgagcgcgtcgttgcgaaagccaaagtgacggcagtcgaaaaagaaaaaggcagaacggtagttgaagtcaacagctatgtgggagaagaagtcgtgttctccggcagctttgacatgtaccgttcaaaacaatcataaaggtggagcatgcatgagaatagctgtagatgcaatgggaggcgacaacgcacccaaagctgttattgacggagtaatgaagagtattgaggcatttgacgatcttcatattacgctggtcggtgacaagacaacgatagaatcacacttgccaacaacatcagaccgcatcactgtgttgcacgccgatgaagtgattgaaccgacggatgaaccggtccgcgccgtacgcagaaagaaaaactcgtctatggtgctgatggcgcaggaagtggctgaaaacagagcggacgcctgcatctcagcggggaatacgggcgcactcatgacagcgggattgtttatcgtcggcagaattaaaggaatcgaccggcctgcgcttgcgccgacgcttccgaccgtttcaggcgacggtttccttcttttggacgtgggagccaatgtcgatgccaaaccggagcatctcgtccagtacggaattatgggatctgtatatgcccggcaggttctcggaatcagctcgccccgcgtcggattgttaaatgtcggcacggaagaaaagaaaggaaacgacctgacaaaaaagacgtttgaattattaaaagaaacaaacgtgaattttgtcggaaacgttgaggcgagagacttgctcgaaggtgctgctgacgtcatcgtcacagacggctttacgggcaacgtcacgttgaaaacattggaaggttcagcgttatcgattttcaaaatgctgaaagatacactgacttcaagttttgtttctaagctcgcagcgggagtgctgaagccgaagctgatggaaatgaaactgaaaatggactattctgagtacggcggggcgagtcttttcggtttgaaagcgcccgtcgttaaagcgcacggctcttctgacgcacgcgctgtttaccatgcgctgcgccaggcgagagaaatggtcagccaaaacgtggcagcatttatagaagaagaagtaaaagaagaaaaaacagatgagtagtctggaggttaccgcatcatgagtaagattgcatttttatttcccggacagggatcacaatatatcggtatgggaaaaggcctgtacgaacgcgaagaagcgtcaaaacgtatttttgatgaagcggatgaaacgcttgaaacaaagctgagctcgctcatttttgaaggcgacgccgaagaattaacccttacatacaatgcgcagcctgcgctgttgacaacgagcatcgccgtattggaaaagtttaaagaatccggcatcacccctgatttcaccgccggacacagcctcggagaatattcggcgcttgttgcggcgggagcgatgacatttaaggatgccgtttacacggtaagaaaacggggagaattcatgaatgaagccgtgccggccggagaaggcgccatggccgctattctcggcatggatgcggagtccttgaaaaaggtaacggatcaagtgacggaaaacggtcatctcgtacagcttgcaaacttgaactgccccggccagatcgtcatttccggaacggcaaaaggcgtggagctggcttcagaagaagcgaaaaacaacggagcaaaacgggcaatcccattagaagtaagcggaccgttccattctgaattaatgaagccggcagcgcaaaaactcgaggaggtgctcagcgcctgtgagttaaaaaatgcggctgttcccgtgatttcaaacgtttcggctgacgttatgacagaaaaagacgatatcaagaaaaaactgatcgaacagctgtactcacctgttcgctttgaagaaaccattaacaaactgattgacgaaggtgtcacgacgtttgttgaaatcgggccgggaaaagtgctttcaggccttgtgaaaaaagtgaaccgtcgccttaaaacaatcgcggtttctgaccatgaaaccatcgaactggcgattcaaacgctgaaggaggagaatcaggatgcttaatgaaaaaacagcagtggtaacgggagcgtcccgcggaatcgggcgggcgatcgcgcttgatcttgcgaaaaacggctgtaacgtagtagtcaactactccgggaatgaagcgaaagcgaacgaagtcgtagatgaaatcaaatctttgggccgaaacgcgatcgcggtaaaagccgatgtatcaaattccgaagaagtacaaaacatgatgaaagaggctgtcgctgcattttcttcaatcgacattctcgtgaacaatgcggggatcacaaaagacaatcttctgatgagaatgaaagaaaatgaatgggatgatgtcattaacattaacttaaaaggtgtattcaactgcacgaaagccgtgacaagacagatgatgaaacagcgctccggccggattatcaacgtatcatcaatcgtcggcgtcagcggaaaccccggccaggcgaactatgtggcggcaaaagccggtgtaatcggcttaacgaagtcatcagccaaagagcttgcgagccgaaatattacggtcaatgccattgctccgggctttatttccacagatatgacggacaagctttctaaagaagtccaagatgaaatgctgaagcagattccgctcgcgcgtttcggtgatccttccgatatcagcagcgttgttacgttccttgcttctgaaggatcgcgttatatgacgggccaaacccttcatattgacggcggaatggtgatgtaaagatttgtttttaaaatttcatcctagtttctctagttttttaaaaacgaatcctctataatacttgaggggaggtgaattgctatggcagatacattagagcgtgtaacgaaaatcatcgtagaccgccttggcgttgatgaagctgacgtcaaacttgaagcttctttcaaggaagacttaggtgctgattccctagatgtagttgagcttgttatggaacttgaagacgagtttgatatggagatttctgacgaagatgctgaaaagattgcaacagtcggcgacgctgtgaactacatacaaaaccagcaataagctgatgctaaaagtcccgcctgacagcggggctttagccctttaatcgttcggttaccggcgtctgacgctgtacgcgctgccgattccgtttacggcggggagcgcggtgaacctgatgtgcctatggaggttactatgtcaaaacactcacattttaaagataaaaaaaagttctataaaaaaatagagcaatttaaagagttccaagaacggatttcggttcattttcaaaacgagaaacttttgtatcaagcatttacacattcatcttatgtgaatgagcatcggaaaaagccgtatgaagacaatgaaaggcttgaatttttaggtgacgctgttttggaactgacgatctcccaattcttatttgccaaatatccggccatgagtgaaggagatttgacgaagctgagagccgctatcgtatgcgagccgtcactcgtctcacttgcccatgaattgtcattcggcgatcttgttctcttgggaaaaggagaagaaatgacgggcggcagaaagcgtcctgcgcttttagcggatgtgtttgaagcgtttatcggcgcactgtatctggatcagggccttgagccggttcagcaattcctgaaagtgtacgtgttccctaaaataaacgatggtgctttttctcatgtgatggatttcaaaagccagcttcaagaatttgtacagcgggacggaaaaggatcgcttgagtacaaaattctcaatgaaaaagggcctgcccacaaccgggaattcgaggcgcttgtctctcttaaaggtgaggcgctcggtatcgggaacggacgttccaaaaaagaagccgagcagcatgcggcacaggaagctcttgcaaaaatgcaaaaacatcatacgaaacaataaaatccccctgtatccctagggggatttcagtatgtctgcgcctgatataagcgggtgattatgataatattgagatacttatacgataaggaggatctgggatgttcctcaaacgtttagacgttataggatttaaatcatttgcagaacggatatccgttgactttgtaaaaggcgtcacggccgttgtcggtccgaacggcagcggaaagagcaacattaccgaagctatccgctgggtgctcggcgaacaatcagcccgctcgcttcggggcggaaaaatggaagatatcatttttgcgggaagtgattcacgcaagcggctgaaccttgccgaagtcacgttaacgcttgataatgaagatcattttctcccgatcgattatcacgaagtcagcgtgacgagacgggtgtaccgttccggagaaagtgaatttctcatcaacaatcagcagtgccgtttgaaagacatcattgacttatttatggactccgggctcggaaaagaagcattctctattatcagccaggggaaagtcgaagagattctcagcagcaaagcggaagaccgccgcagtatttttgaagaagcggccggcgtgctgaaatataaaacaagaaagaaaaaagcggaaaacaaactgtttgagacgcaggataacttaaacagggtggaagatattctccatgagcttgaagatcaggtcgaaccgctgaaaatccaggcttcaatcgccaaagactacttagaaaaaaagaaagagcttgagcatgtcgaaattgcccttaccgcctttgacatcgaacaactgcatggcagatggtcgggtttaaaagacaaggtgcaggctgctaaagaagaagaattggcggaatcatcggctctatccgcaaaagaagcgatgatagaagagacgagagataaaatccacgcgcttgatgaatccgtcaacgaactgcagcaggttctgctcgtgacaagtgaagagctggaaaagctggaaggccggaaagaagtgctgaaagagcgcaaaaaaaacgccgcgcaaaaccgggaacagcttgaggaatccgttacacaatacacgaacaaagaagccgaactgaaagcggacattgaaaaacagtctgccgtctatgataagctgcgtgcggaagtgaagcggttaaacgcccaagtgaaagaaaagcagcaggctctcagtctgcataatgaaaatgtagatgagaaaatcgaacaattaaaaagcgattactttgaattgttaaacagccaggcgtcgattcgcaacgagctgcagcttttagatgaccagatgtcccaatccgcggtccagcaggcgagactgacagcaaacaatgaaaaatatcttgaagaacgtaacgatattgcagtccgcaaagcggcgtgcgaagaagaattggctgccgttgaagaggatattcacaatcaggtcgtccgctttcgcgaagtccagacagcatatgaacagaaaaaacgccaatatgaaaagaaagaatcagcgctgtatcaggcatatcaattcgtccagcaggccagatccaaaaaagatatgcttgaaacgatgcaaggcgatttttcaggattttaccaaggcgtaaaagaagtgctgaagcagaaagagcagctcggcggcatccgcggcgccgttctcgaactgattgccaccgaacaaaaatatgaaacggcgatcgagattgcactcggcgcagcggcgcagcacgttgtcacagacgatgagcaggcggcgcggaaagcgattcaatatttaaaacagaattcattcggccgcgcgacgttcctgccgcttacggttatgaaaccgcgccagcttcaaacccgtgatgaacagacggcttcaaagcatccgtctttccttggcacagcaagcgggcttgtcacatatgatgcggcgtatcggaatgtcattcaaaaccttctcggcaccgtgctgatcactgaagatttaaaaggcgcgaatgaactggccaagcttctcgggcaccgctaccgcatcgtgacgcttgagggcgatgtcgtcaatccaggcggatcaatgacaggcggcgcggtcaaaaagaaaaacaattctctgctcggcagaagccgtgagcttgagacggtgactgcgcggcttgccgaaatggaagaaaaaacagcactgctcgaaaaagaggtcaaaacgctgaagcaggccattcaagagcttgaacatacgctgagcggtctccgtgaagacggtgaaactttcagaacaaagcagcaggatgtaaaaggcaggctgtatgaactcgaagtcgctgaaaagaacatcaatacccatctggagctttacgatcaggagaaagcatcactgacggaaagcagccgggaaaaagagacgcgcaaatcagctctggaagaacagctgagtgaggcatccggccagctgaaagagcttgaggaagagatggaaatgctgacaaaacaaaagcagaccctatcctcaacaaaagaaacgctctctcatgaactgacggaatgtaaagtggccgctgcgaaaaaagaacaggcgtgctcgagtgaagaagacaatctcaaaaggctgaaaaaagagcttgaggaaacgcaactcgctctgaaagaaacacgggaagatttaagcctcctgacctcagagatgacgtccagcacaagcggtgaggagcagcttgaagaagcagcccatcacaagcttcacgataaaacgagaacgatcgaattgatcgccagccggcgcgaccagcgtgtgaagctccagcgggctcttgatacgaacgagcttgagctgaaagagatgaagcgtctgtacaagcaaaaaacggaaattctgaaagatgaagaggtaaaactcggccggatggaagtcgagcttgataatctcttgcagtatttacgcgaggaatacagcttatcctttgaaggggcaaaagaacaatatcagcttgaactcgagcctgaagaggcgagaaaacgggtcaaactgatcaagctttcaattgaagagctcggaacggtcaatctcggcagcatcgatgaatttgaaagagtaaacgaacggtatcagtttttaacagagcagaaaaatgacctgacggaagcgaaaaacacactgtttcaagtcattgaagaaatggattctgaaatgacgaagcgattccatgaaacgtttatccagatccgttctcaattcaacgacgtgttccgttctttattcggaggaggacgggctgaactgaagctgactgatccgaatgatcttcttaattccggggtggacattatcgcgcagcctccgggcaaaaaactgcaaaacttaaatcttttgtcagggggagaacgggcgctgactgccattgcccttttattctccattctgaaagtaaggcccgtgccgttctgcgtccttgatgaagtggaagctgcgcttgatgaagccaatgtattcaggtttgcgcaatatttaaaaaaatacagcggcgacagccagtttatcgtcatcacccacagaaaaggcaccatggaagaagcggatgtcctctacggtgttacgatgcaggaatccggcgtttcccgaatggtttcggtcaaactggaagaaacaaaagaattcgttcagtaatgaggaaagaggttgaaagatgagcttttttaaaaaattaaaagagaaaatcacgaaacagacagactccgtctctgaaaaatttaaagatggtcttgaaaaaacaagaaattccttctcgaataaagtgaacgaactcgtctcccgctaccggaaagtcgacgaggatttcttcgaggagcttgaggaagtgctgattggcgctgacgtaggttttacaaccgttatggagctgattgatgaactcaaaaaagaagtgaagctgaaaaacatccaggatcctcaggaagtgcagtccgtcatttctgaaaagcttgtcgacatttataacagcggcgacgaacagatttctgaattaaatattcaggacgggcgcctgaacgttattctgcttgtcggggtaaacggcgtcggaaaaacgacaacaatcggaaaacttgcccataagctgaagaatgaaggcaaatccgttgtgctcgctgccggagacaccttcagagccggggcgattgaacagcttgaagtgtggggggagcgtacaggcgtgcctgtcattaaacaggctgccggaagcgaccctgctgcggttatttatgatgccgtacacgcggctaaagcaagaggagcggatgtgctgatttgtgatacggccggccgccttcagaataaagtaaacttaatgaaagagcttgaaaaagtcaaacgcgtcatcgaacgcgaagtgcctgaggctccgcatgaggttctccttgcgcttgatgcgacgacaggccagaatgcgatggcgcaggcgaaagaattctccaaagcgacgaatgtgacgggtatcgcgttaacgaagcttgacggcaccgcaaaaggcggtatcgtcttggcgatccgcaacgagcttcacatccccgtgaaactggtcggcctcggagaaaaggttgacgatctccagcggtttgatgcagaatcttacgtatacggtctcttttctgatttagttgaaaaagccgaggattaatgaataaaaaacgagtataaaatgggcggttttatactcgtttttttatacgcattgatagatcggaatggagggggcaattgttggacaaatggctgaaagctgaattggaaagtaagatcggcgcgataaaccatatgtcgctgttggatgaacagggaggcacttcaaccgttcgaaaaatagtgaccggccaagacgcatttctgctgaaaagttcttttcaacagaagtatcgggaatggttaatgagagaagccttcgttttacaaaaactgacggaaaatcatcatctgcctgttcctatttattatgggatgatacaggaacagcatgccagccatatcatcatgtcatttgaggatggaatcaccctgacttctgctttaagaaaagcaaaaggagatactgaaaagaaaaagctgatcaaaagtttcggccagtttctgcaacggctgcatgaaaccgaaatggtctctggtttacagccggaaacagactggctcgatctgcaaatcaaacgagccggagaatatgtcaaaaaaggacaagctgaaggaagtgcagagcttttgaaggaattggacagggacaggcctgttcctgttcagcagacaatgattcacggtgactgtacgactgataatgtgctggtgaaagacggagaggtctatctgtttatcgatgctgcgggaatatcggcgggagatccgcgatatgatgaatcattagcgatcagtcattttgtcacaaatgaagcatgcctcaatgctttttacgaaggctattgccgctatcgtgtatcaaaacaagaattcgagtattttaacgacggtctatatgaatttttttaaaaaaacttattatgtaaaaagagcatcctgctttgacaagataaaaacttgacacacgctctgaaaccatgtaaactaagtttttgtaaagggatttgacttaacaaaggggagagctcaaatgtcgctcgaaaaaacgacgagaatgaactatttatttgacttctatcagtcgttgctgacgtcaaaacaaaagagctatatgtcgctttattatctggacgatttctcccttggtgaaatagccgaagagtatgacgtttcaaggcaagccgtttacgataacatcaaacggactgaagcgatgcttgaacaatatgaagaaaaactgctcctttttaaaaagtttcaggagcgtaaagaaatgtttacaaagctgaaagagcttgcttccggtttgcaggaagaggaaaaaatgacggctctgattgaagcgcttgagaaattagattaggaggcggcaaacaatggcatttgaaggattagccgaccgactgcaaaagacgatttcaaaaatccgcggaaaaggaaaagtcagcgaacaagacgtaaaagagatgatgcgtgaagttcgtcttgcgcttcttgaggctgacgttaactttaaagtcgtaaaggattttgtgaaaaaagtaagtgaacgggctgtcggacaggacgttatgcagagtctgacacccggtcagcaggttattaaagtcgtaaaagaagagcttaccgagctgatgggcggcgaagaaagcaaaattgccgtcgccaaacgcccgccgaccgttattatgatggtcgggctccaaggtgccggtaaaacgacaaccacggggaagcttgccaacctgctgcgcaaaaaacataaccgcaaaccgctgctcgtggctgcggatatttaccgccccgccgcgattaaacagctggaaacactggggaaacagcttgatatgccggtcttttcgcttggcgatcaggtcagcccggtggaaattgccagacaggcgattgaaaaagcaaaggaagagcatcatgattatgtgattttagataccgccggacggctgcacatcgatcatgaactgatggatgagctctccggcgtaaaggaagtcgcaaatcctgaggaaattttccttgtcgtcgactcaatgaccggtcaggatgcggtaaacgtcgccaaaagctttaatgaccagctcggtttaacgggcgtcattttaacaaagcttgacggggatacccgcggaggtgcggcgctttctatccgcgcggtcaccgaaacgccgattaaattcgccggaatgggagaaaagctcgatgctcttgaagcgttccatcctgaacggatggcatcccggattctcggaatgggtgacgtgctgacgctgattgaaaaagctcaggcgaccgttgatgaagacaaagccaaagagcttgagcagaaaatgagaacgatgagcttcacattggatgattttctggagcagctcggccaggtccgaaacatggggcctcttgacgaactgctgcaaatgatgcccggcgcaggcaaaatgaaaggcttaaaaaacatccaagtcgatgaaaaacagctgaatcatgtggaagcgatcattaaatcaatgactgttcttgaaaaagaacagccggatatcattaacgccagccggcggaagcggattgccaaaggaagcggaacatccgttcaggaagtcaaccgtcttttaaagcagtttgaggaaatgaaaaaaatgatgaagcagatgaccaacatgacaaaagggaagaaaaaaggctttaaattaccttttatgtaatcggttatacatgataaaaccgttgttaagaaaaaacactttacaaacacttttatcattgttaatatactatcttgttgaaatattttcggaggtgctagtaaaatggcagtaaaaattcgtttaaaacgtatgggagcaaaaaaatctcctttctatcgtattgttgtagcagattctcgttcaccgcgtgacggccgtttcatcgaaacagtcggcacatacaatccggttgcaaagccggctgaagtgaaaatcaacgaagagcttgctcttaaatggcttcaaacaggagctaaaccttctgatacagtccgcaacttgttctcaagccaaggaattatggaaaaattccacaacgctaaacaaggcaagtaatgactgatcagaacttggaagatttgattgtcagcattgtggctccgcttgtcgaccatccggaagacataacggtcacaaaggaagagactgatcaaaagattgcgctgcgcttatctgtcaataagtcagataccggtaagattatcggaaagcaaggccggactgcaagagcgattcgaaccgtcgtttttgcagctggcgcacagtcttctaagaaagttcaatttgaaatatttgactgaaaaagggagagggccggcacctcccctttttttacacgtaaaaaaggcaaatgaacagaaatatgttggaagagtggggagtctggtcctatgcagattattcacagggtaaccgttatgcaggttctgaccgagcaaagcaaggaaaagcttttggcctcttttgcagaaaaaaagcaaacgcttgaacgagaatgcagccagctctattttcagcttagaaaacatgaaaaagatcagcagaatcccgatgtagcggaatcttttaaaaaagccattgagaaaagacaagacaaaatcaaaatgatcgatttccaaataagccagacagagtcgctcccgcttggaagcgaagtgaaggaaaaggagatcgatgcgctgctttcaatcaacgtcggtgataactggcatgaaaaaacagcggcaaataccatcgtcataaaagacggggtagtaattgaaatccgcccgaggtgataatatgacaaacagatggtttaatgtaggcaaaattgtaaatacccacggcattaaaggcgaagtgcgggtcatttctaaaacggactttgccgaagaacggtacaagcccggcaatacgctctatttgtttgcggaaggggctgcggagccaatcaaagtaacggtcagcgcccacaggcttcacaagcagtttcacctgctgcaattcaaagaaatgccgagtctcaatgaagtcgagcacctgagaaacatggtgatcaaagtccctgaagaagacttgggagagcttgaagaagatgaattttattttcatgaaatcatcggctgcgaggttgtgtcagaagacggggaactgatcggcacagtgaaggaaatcttgacgcccggggctaatgacgtatgggtggttgcaagaaaaggcaaaaaagatgcgctcattccgtatattgcttctgtggtaaaggatattaatataaatgagaagaaaattaagattcatgtaatggaagggttaatagacgaatgaaaatcgactttttaacactgtttcccgaaatgtttcaaggggtgctcggctcatccattctgcaaaaagcacaggaaaaagaggctgtccgttttgacgttatcaatttccgggctttttcggataataaacaccaaacggttgatgattacccgtacggcgggggagccgggatggtgttaaagccgcagcccgtatttgatgcggttgaaaagctgacagccggtacggacgccaagccgcgcattattctcgtctgcccgcaaggtgagcgttatacgcagaagaaagccgaagagctggcggaagaggaacatctcatgtttatttgcggacattatgaagggtatgatgaacggatccgggaacatcttgtcactgatgaaatctccatcggggactttgtgctgaccgggggagagctccctgccatgatgatcgccgacagcattgtcaggcttttgccgggcgtcctcggaaaagaagcatcccacgtggaggattccttcagcacggggcttttagagcatccgcactatacgaggcctgcagattatagaggcttaaaagtgcctgagacccttttgtcgggcaaccatgccaaaatacaagaatggcgcaataaagaatcaatcagaagaacctttttaagacgtccggatcttcttgaaaactatcctctcactgatgaacaaagaaaatggatttccgagtgggaaaacgaatagattctattgcgcaggcgatgaagatatgataagatactacttgtggcttaaggaggcttatccttcagaagcttgaaaacgatgttccgctgtgccttgcagttgtggccaagagcatctgttggaaggagttgaaaacgatgcaaaaactaattcaagatatcacaaaagaacagcttcgcactgatcttcctgcgttccgtcctggtgacactttacgtgtacacgtaaaagttgttgagggtaaccgtgagcgtatccagatcttcgaaggtgttgtgatcaagcgtcgtggtggtggaatcagcgaaacgttcacagttcgtaagatttcttacggtgttggcgttgaacgtacattccctgtacacacaccaaaaatcgcgaaaatcgaagttgtacgttacggtaaagtacgtcgcgctaagctttactacctgcgtgaacttcgcggaaaagcggctcgtattaaagaaatcagacgataatgataacgaacgaaaagagcttgttacccgtaacaggctctttttttatatgaaatttgtaaaagcagaacaagcaacgtaaaatacataagagatcatcggaacatccggttccggtaaataaggcaggtgtcgaagtcacatgaccattcaatggttcccgggccatatggctaaagcgagacgggaagtaacagaaaaactgaaattaattgatatcgtatacgaattggtggatgcgagaatcccgatgtcatcgagaaatccgatgattgaggagattttaaaaaataagccgcgcattatgcttttaaataaagccgataaggcggatgcggctgtgactgcccagtggaaggaccactttcaggaacagggcattccctctctttcaataaactccgttaacgggcagggactgcatcaaatcgtgccgtcctcaaaagagctgctgaaagataagttcgataaaatgaaagcaaaaggcgttaggccaagagcaatccgcgcattaatcatcggcattccgaatgtcggcaaatctacgctcattaaccggctggccaagaaaaacattgccaagacgggagacaggcccggcattaccacttcacaacagtgggtaaaggtaggcaaggaattagagctgctcgatacaccgggaattttatggcctaaatttgaagatgagcttgtcggcttgcgcctggcgatcaccggggcgattaaagatacgattatcaacctgcaggatgtggccgtcttcgggctgcgctttctggaagagcattatcccgaccgtttgaaggagcgctacggacttcaggaaatccctgaggatatcgccgctcttttcgacgcgatcggtgaaaaacgcggctgtttgatgggcggcggaatggttgactatgataaaacaacggaagtcatcattcgggacatccggacggaaaaattcggcaggctttcatttgaaacaccatcagaataaagacgcgcagcgatgcgggtctttattttttccgcagaataccgatatacataatgtaagggagaagagaacgtgaatacattaaccgtaaaaagcgtaaaagaacgcctgcaagaggtcagggacgaaagcgaccccttccttgcccaatgtgagaaagacccgagaaaaagcgtacagacgcttttagagcaatggctgaaaaagcacgcgaaggaaaaagctcttaaagagcaatggctgaacatgacggcatacgaaagactgtcatccaaaaagggcttccgcctgattgcgggtgttgacgaagccggaagagggccgcttgccggaccggttgtcgccggcgccgtcattttgccggcagaatgcgagattctcggtctcacggactcgaagaaattgtcggaaaagaagctcgaggagtattacagccggatcacggaagaagcggcggctgtaggagtcggcattgtccatgcggacgtcattgaccggatcaacatttatgaggccgcgagactggcgatggtaaaagccgtcaatgctttaacggaaacacctgattatctgcttgttgatgccatgacccttccgcttgacattccgcagtcatcagttataaaaggggatgccaaaagcgtgtcaattgccgccggagcctgcattgcaaaagtaacgcgggaccgtctcatggctgagtacgccaaaacctaccccatgtacggctttgaaaaaaataaaggctacggaacgaaagaacatcttgaagctcttcaggcatacggaccgacaactattcaccgaaaaacgttcgctcccgttcaatcttattgttagaaaagaggcttaagacatgaacataagcggcgaattccaagcggctttcagacagctgacggcggaaatctctccggaccggcaagacggcggtaaagacagcggctctcaaaggctgctgttagggaaggttctccgtttgctggacgatcaaagcgctcttatccaaatcggcggccggacgatgcagggaaaacttgaaaccgcccttcgtccgcaggcgtattactggttttcttatgacaaacagccggcggaaaaaacaggccggcttcatgtcatcgaccaattcgaaggaagcccgaaaaccgttcaggaagcggcgggaagcctgttaaacgcactttctgtcaaaccgggccctgtgtctctgcagattgccgaaacgtttatgcagcagaagctgccgatgacggaaaacagcctcaaagcttgcatccgctgggctgaatcgcttccggccgccgaattgaaaaaagcggcggaaacaatcgtatttgcgctgaaacgggaactgcccgcacatccggaagtcttgtcagccattcatgccgttaaatatccggttccgacccggcgcctcctctcaggactgcttcaggcaatcaatcaggctccgcaatcggcaaaagagctgtctgtgctcaaagaggcggtttctgacgtgttaaacgcagaaacggatcttcatgcagaacgtctcctgaagaagcttgccgaggctgcacgcatgccgctctcagaaaccgggctgatggatgaaggagaacggacggaatcaaaacaatcaccatttgtccgagagactcgtgaaaacggaaaggcagtctcaagccagccttctcctccgagtgcacggacagatccggaactgcctgaaaaaacggcaaaacagattatagagaaattaatgacatcggcagaaaaaactgaaaaccgtcccgtaaaagtaacggcggagatcattaaggctttcatttctcaagaaaaaacattgaaaacagcacctgttcttcaaaacgtacatctgacagaacaggagacggctgttttcgaaaaagccgctcagctcaccgaattgaaatatgcggaaaaacatgatgtattaagccttttgcagaaaatcaaaaaaggactgggcacgcgtgatgaattatcattcattacagcgcttgaaaaaggcgtgtctccgcagccggagaaacaagcgctgaaaacggccctccaagccgtccggacgcttcaagaagcgccccaatccgttaaacaagaggcggaaccgcttattcataaattaaacggccagctgtttattgagcagcataacccttcttttacacagatggtgctgtcatttccgctgggagcgtccgcgtatgagaatgacatcacagttctctttaaaggacggaagaagccggacggaaaactcgatccgtcacattgcaggctcctgtttttgctgcatcttgaaacactgcaagaaaccgttgtggactgcatgattcagcaaaatgtaatgaccattacggttgagactgattttgagcttcaggcggccatcgaccctctcgtaccggctttaaaagaagccataaaagaaacgggcttcagcctgtcaggcgtcacggctaaaaaacggcgcccgaaagaccagagcgctcttgtggaagagtttatagaaaaagacggcggaagaaaagtggatgtgaaaatatgaaagagcaaacgccgttaagaagagctgtcgccctgcattacgaccggcagaaagaccaagtcccgaaggttgtcgcaacaggcagggggcacgtggcggaaaatattataaaagaagctgagaaggctggggtccccattcaggaagacagaacccttgtcgaattaatgcgccatttgacggttgatgatcagataccggaggcgctctatgaaaccgttgccgaaattttttcatttgtttacagactggacgaaaccctgaaaaacgaaaaataagggccattcatttcccggactccgtttaaatttatattttcaataaaataaaagttagaatgtttggaaggatataaagattttgttttgaaccctagacaattcttccagtattatatagaatgaaagcgcagtctatttttagttttgctacataagttaggaggatgggaaatgaatatccatgagtaccagggaaaagaagtcctcagaaaatacggggtgtctgttcctgaaggtaaagtggcttttacagcagaggaagcagttgaaaaagcagagagcctgtcaagctcggtttatgtcgtaaaggcgcaaatccatgctggcggccgcggcaaagctggtggggtaaagattgcaaaaacaaaagatgaagtgaaagagtatgccgaagaactgttaggcaagacgctcgtcacacatcaaacgggtccggacggacaagtaataaaacgcttacttattgaagaaggctgcgatattaaaaaggaatactatgtcgggcttgtacttgaccgtgctacttcaagaatcgttttaatggcgtctgaagaaggcggaacggagattgaagaagtagcggaaaaaacacctgaaaaaattaaaaaagcggtaattgatccggctgtcggccttcagggctatcaggcaagggaaattgcattcgcaattaacatcccgaaagagcttgtcggcaaagccgctaaatttatgctcggtttatataaagcatttgttgagaaggactgctccatcgccgagatcaaccctctcgtcgttacgggggacggaaacgtcatggcgctggatgctaagctgaacttcgacagcaatgcgttatacagacaaaaagacattatggaatacagagatttagatgaagaagatccgaaagaaatcgaagcgtcaaaatacgatttaagctacatttcccttgatggaaatatcggctgtatggtaaacggcgcgggtcttgcaatgtctactatggatatcattaaacactacggcggagaacctgcaaacttccttgatgtcgggggcggcgcaaccgcagaaaaagtgacggaagcttttaaaatcattctttccgatcaaaacgtaaaaggaattttcgtcaatattttcggaggcatcatgaagtgtgatgtcatcgccgagggcgttgttgaagcgacgagacaagtcggattgacattgccgctggtcgtgcgccttgaagggacaaacgtagatttaggaaagaaaatcctgaatgaatcaggcttaaacatcacatctgcggaatcaatggcagacggcgcacagaaaatcgtatccttagtttaggaaagaatgaaaggcaggggaccagataatgagtgtttttattaataaagatacaagagttattgtacaggggattacaggttctaccgctttatttcatacaaagcagatgctggaatacggcacgaatatcgttggcggtgtaacacctggaaaaggcggaacggaagcggaaggcgtaccggtattcaatacggtcgcagaagcggttcatacaacgggcgcagatgcgtcagttatttacgtgccggctccgtttgcggcggacgcaattatggaagcggttgacgcggaaattgatcttgtcatttgtatcactgagcacattccggttttggacatggtgaaagtgaagcgttttatggaaggcaagaaaacgagattaatagggccgaactgccctggtgttattacacctgaagaatgcaagatcggcattatgccgggatacattcataaaaagggtcatgtaggcgttgtgtcccgttcaggaacattgacatacgaggccgtccatcagctttcagaagccggcgtaggccaatctaccgctgtagggatcggcggcgatccggtcaacggcacgaactttattgacgtgttaaaagcgttcaatgaagatcctgaaacacatgctgtcatcatgatcggagaaatcggcggcacagctgaagaagaagcggctgagtgggtgaaagcgaacatgacgaagcctgttgtcggctttatcggcggtaaaaccgcgcctccgggaaaacgcatgggccatgcgggcgccatcatctccggaggaaaaggcacggcagaagaaaaagtcaagacgatgaacgcctgcggaattgaagtcgcggaaaccccttctgtaatgggtgaaacgctgattaaggtgttaaaagaaaaaggcttatttgaaacgtgcaaaactcactgatcgaagcaggggcagccgtaacggctgttcctgtttttgctgaaaaaaagaggaggtttccagatttggatcaagcatcgcgctgtttaatggtctgcagtattaatcaaatcatttccccgtctcttctattaaaatggtggaaagctgatcattctctgtcttttttaccggatccgcatccattaactgttttatcagaagggaaaacagccccggaagcaatttttcgggaaatagagcgcaaggatccggaacttgatgaagttctgtccgattaccgccgagaaggcattactgtcattccgatttcatcaagccgctatccaacatggcttaaagcgatttatgatccgccggctgtcttgtatgcaaaagggaacacgctgcttcttgaaaaaggcagaaaaatcgggattgtaggaacgcggaaaccgacggaagacggaataaaagcggttgggcatctttccgccgaactctcaaaaaaaggctgggtcattgtaagcgggcttgcatccggtatagacggattgtctcataaggcgagcatcagggcaaaagggcttacgatcggcgtgatagccggcggattccatcacatctatccccgggaaaatctcctgttagcagaatacatggctgaacaccatctcctactctcagaacatcctcctgaaacaaagccgaaaaaatggcactttccgatgagaaaccgcataatcagcggactaagtgaaggaattgtggtcgtgcagggaaaagaaaaaagcggttcattaatcacagcttaccaggctctcgaccaaggcagagaggtatttgccgttccgggttccatatttaatccatattccggaggacctataaaactcattcaagaaggggcgaaagctgtattatgcgcagaggatattgacggagagctgaccgcccgatgcgttcagtatacggaacccttttgaaatatcgtttgacaaacggtattgtaatatttaataatagtgaggatttaaagttgcacattattttcatgtataaaatgacgttcatcataaagaatgaaatgttgaaagccataaaaaggcagctctaaaatgaattgatacttgaaaagagagagaacacctcttgagggggatgaaaatgtctgattatctagtcatcgtggaatcgccggccaaggcgaaaacgattgaacgttatttagggaagaaatataaagtcaaagcttcaatgggacatgtccgggatcttccgaaaagtcaaatgggagttgacatcgaacagaactttgaaccgaaatatattacgatccgcggaaaaggacctgttttaaaagaattaaaaacagcggcaaagaaagcaaaaaaagtctatctcgcggccgaccccgacagagaaggggaagcgattgcatggcatctcgcacacagtcttgatctggatctcacctcggactgccgggtcgtctttaatgaaataacgaaagacgccattaaagaatcatttaaacatccgcgcatgattaatatggatcttgtcgatgcgcagcaggcgcgccgcatactagacagactcgtcggatacaaaatcagcccgattctttggaaaaaagtaaaaaaaggtctcagtgcgggccgtgtgcaatccgttgcgctccggctgatcatcgaccgggaaaaggaaatcaatgactttaaacctgaagagtactggacgattaccggctcatttttaaagggaaaagagacatttgaagccggatttttcggaaaaaacggcaaaaagcttcctttaaaaagcgaagaagacgtaaaagccatccttgctcagctgaaaggcaataagtatacagttgacaaggttacgaaaaaagagcgcaaacgaaatcccgctctgccgtttacaacgtccactctgcagcaggaggctgcaagaaagctgaatttcagagcgaagaaaacgatgatgatcgcgcagcaattatatgaaggaattgatctcggcaaagaagggacagtcgggctcatcacgtatatgagaacggactcaacgcggatttccaatacagccgttgaagaagcgtcagcttttattgatcaggcgtacggcaaagagtacttagcgggaaaacggaaaccggcaaagaaaaatgaaaacgcacaagatgctcacgaagcgatccgcccgacttcggtgctcagaaaacctgccgacttaaaagcggtgcttggaagagaccagctcagattatacaagctgatttgggagcgctttgttgcaagccagatggcccctgccgtccttgatacgatgagcgtcgatctcagcaataacggattgacattccgggcaaacggaagtaaagtcaaattcgccggcttcatgaaagtctatgtagagggtaaagacgatcagctggaagaaaaagaccgcatgcttccggaccttaaagagggagacacggttttatcgaaagatattgagcctgagcagcactttactcagccgcctccgcgttatacagaggcgcgcctggttaaaacgcttgaagaactggggatcggccgtccttcgacatatgcgccgactcttgacaccatccagcgccgcggttacgtgggattagacaataaacggtttgtgccgactgagcttgggcagatcgtgctggatcttatcatggagtttttcccggaaatcattaacgttgaattcacggctaaaatggaaagagaccttgatcatgttgaagatggccagacagaatgggttcaaatcattgacagcttctatactgatttcgaaaaacgcgtgaaaaaagcggaagccgaaatgaaagaagtggaaattgaacctgaatacgccgatgaagattgtgagttatgcggctcccggatggtttataaaatgggccgatacggcaaatttatggcgtgctccaatttccctgactgccggaatacaaaaccgattgtcaaacaaatcggcgtaaaatgccctaagtgccatgaaggaaacattgtcgaacgaaaatcaaaaaagaaacgcatcttttacggctgtgaccgttatcctgaatgcgactttgtatcttgggacaaaccgattgaacgaaaatgcccgaaatgtgaaaatatgctcgtagagaaaaagcttaaaaaaggcatacaagtccaatgcgtcgaatgcgattataaggaagaaccacagaagtagcggtgagcagagccttgctcaccttctttgtgtggaagggacaaacaacaggagatgaaaagaaatgaaccagcaaacagttaatgtaatcggagcaggccttgccggaagtgaagcggcatggcagcttgcaaaacgaggaattcaagtgaaactatatgaaatgcggcccgtcaggcagacggcagcccatcatactgataaattcgccgaactggtatgcagcaactccctccgttcaaatacactcgccaatgcggtaggcgtattaaaagaagaaatgcgggcccttgactcggcaatcattcaatctgctgataaatgctcggttccggccgggggagcgcttgccgttgaccgtcatgaatttgcgcaaagcgtgacggatctcgtgaaaaaccatccgaacgtaacggttcttactgaggaagtaacagagattccggaaggcccgactgttatcgccaccggaccgcttacgtcagaatcgctttcacagcagctgaaagagctcacgggagaagagtatctgtatttttatgacgcggcggcgccgattgtcgaaaaagacagcctcgatatggagaaagtgtacttaaaatcccgttatgataagggagaagcggcgtacttaaactgcccgatgacagaggaagagttcgaccgtttctatgaagcattgacgacggctgagacggtacctttaaaagaattcgagaaagaaatcttctttgaaggctgcatgccgattgaagtcatggcgaaaagaggcaagaaaacaatgctgttcggaccgatgaaaccggtcggactggaagatccgaaaacaggcaagcgcccttatgcagtcgttcagctcagacaggatgatgcggcgggaacgctttataatattgtaggttttcagacacatttaaaatggggagaccaaaaagaagtgcttaaactgatccccggtcttgaaaatgttgatatcgtcagatacggcgtcatgcacagaaacacatttatcaactcgccgagccttttgaatccgacatatcaatttaaacagcggaatgatctgtttttcgcgggccaaatgaccggcgtagagggttatgttgaatctgccgcttcaggtcttgtagcgggaatcaatgccgccaaacttgtgctcggtcaggatcttgtgacattcccgcaggagacagcgatcggaagcatggctcactacattacgacgacaaatcagaagaacttccagccgatgaatgcaaacttcggcctcttaaaagaattgcctgtaaaaattaaaaacaaaaaagaacgaaatgaagaatacgctaaacgcgcaattgagactattcaaactatttcgaaaacgatatagcttttcattgcaacttcgatgcattatatgataccatttaaaagcccttcggagagggaggtcttcataatgactgagaatgttaacttttttttaaagttattcgttgaatatttacaaattgaaaaaaattattcacaatatactattgtgaattatgttaattcgattgaagaatttgggatgtttctgcatgctcaaaatataaatggaatgaaagaagctgcatatcatgatgtgagaatatttttgacggaggcttatgaaaaaggcctgtcaagaaaaacaatcagcaagaaaatttcagctttgagaagcttctataaatttttaatgagggaaaagcttgttgaagagaatccgtttcagcttgttcatctgccgaaacaagagaaacggattccgaagtttctttatgaaaaagaacttgaggaactattcgctgtttcagacagaagtcagccgtcagggatgcgcgatcaggccctgcttgagcttctttatgcgaccggaatgagggtcagtgagtgctgtacgctcactgtcggagatcttgacctgttcatggatacggtgctcgttcacgggaaaggcaagaagcagcgctatatcccgttcggctcatatgcccgtgatgcgctggagctgtatatcaacagcggaaggcagtgcctgcttgaaaaagcaaaagagcctcatgatgtgctgtttgtcaatcaaagaggcggcccgctgaccgccagaggaatccggtatattttaagcgggcttgtaaaaaaagcatccggcactttacatatacacccgcatatgcttcggcacacgtttgcgactcatctgctgaatgaaggggctgatttaagaagcgtccaggagcttttgggccattccaatctgtcttctacgcagatttacacgcatgtatcgaaggaaatgctgagaaacacatatatgtcccaccacccgagagcttttaaagaaaattaaaaggaggcccttctcatgtcatcttttcatgcgacaacgatttttgccgtccagcataacgggaaaagcgctatgtcaggagacggccaggtcacattcggtcaggctgtagtcatgaaacataccgcgagaaaagtgagaaagctgtttaacggaaaggttctggccggatttgcgggatctgttgcagacgctttcacactttttgaaatgtttgaggcgaagcttgaagaatacaacggcaatttaaaacgtgcgtcggttgagcttgcgaaagaatggcgcagcgataaagtgctgcgcaagctggaagccatgctgattgtcatgaaccaggataccttgcttctcgtatcgggaacaggtgaagtgattgagccggatgacggcattttggcaatcggctccggcggaaactacgccctgtcagcaggaagagcgctgaaaacctatgccggagagaatctgtccgccaaagatattgcaaaagccgctttgaaaatcgcgggcgagatttgtgtgtacacaaacgatcagatcattttggaagaacttgaatagaaaggacttgaggcgcatggaaaacaaaccgttaacaccgagacaaatcgtagatcggttggatcaatacattgtaggacagcaggatgcgaaaaaagctgtcgccgtggcattaagaaaccgctatcgcagaagtcttcttgatgaaaaactgagagacgagatcgttcccaaaaacatcctgatgatgggcccgaccggggtggggaaaacagagatcgccagacggatcgccaagcttaccggtgcgccatttataaaaattgaagcgacaaaatttacagaagtcggctatgtaggcagagatgtcgaatcaatggtcagagacctcgttgagacatccgtgcggctcattaaagaagaaaaaatcagcgaagtgaaagaacaggctgaagaaaatgcaaacaaacgtatagtgcggcttctcgttcctggaaagaaaaaacaagcgggtgtgaaaaatccgtttgaaatgcttttcggaggaaaccaggcggcaaatgatgatgaagccgaccagcaggaagaagcaagccttgaagaaaaaagaaaacgcatggcgcatcagctcgcattgggagagctcgaagaccattacgtctccgtagaggtggaagagcagcagccgtcgatgtttgacatgctgcaaggctccgggatggagcagatgggcatgaatatgcaggatgcgctgagcaatctggtgccaaaaaagaaaaaacgccgcaaaatgacggtcagagaagcaaggaaggttctgaccaatgaagaggcaggcaaattaatcgatatggatgaagtcggccaagaggccgtgttaagagctgaagagggcggcattatcttcattgacgaaatagataaaatcgcaaaaaacggaggggcttcttcctcagcagatgtatcgagagaaggcgttcaaagagatatccttccgattgtcgaaggatctaccgtcgtcacgaaatacggctccgtcaaaacagatcacgtgctgtttatcgcagccggggcattccatatggccaaaccgtctgatttgattccggagctgcagggccgctttccgattcgtgtagaattgagcaagctgacggtagatgattttgtgaagattctcgtcgaacccgataacgcgctgttaaaacaatatcaggctttattgcagacagaaggtatatctcttgaattttctgacgaagctattcgtaagatcgccgaagtagcttatcatgtgaatcaggatacggacaacatcggagcgagaaggcttcacacgatattggaacgtctcttggaagacctgtcgtttgaagcgccggacgtgacgatggaaaaagtcgctatcacgccgcaatacgttgaagaaaagctcggaacgattgcaaacaacaaagatctaagtcaatttatattgtgaaaatttaataagaggaattctaggaggattatttatcatggctttactacaaaaaacacgaattattaacagcatgctgcaggctgcggcaggcaaacccgtaaactttaaagaaatggctgaaacgcttcgtgacgtcattgattctaatattttcgtcgtcagccgcagaggaaagcttttgggctactctattaatcagcagattgaaaatgaccgaatgaaaaaaatgcttgaagaccgccagttcccggaagagtacacgagaaatctgttcaatgttccggagacgtcttcaaaccttgatatcaacagcgaatacacggcgtttcctgtggaaaacagagacctgttccaagcgggcttaacaacgatcgtgccgatcatcggcggaggagagagactgggcacgctgattctgtcccgtctgcaggatcaatttgaagatgatgatctcattcttgctgaatacggagcaaccgttgtaggaatggagattttaagagaaaaagcggaagaaatcgaagaagaggcgcgaagcaaagcagttgttcaaatggcgatcagttctctgtcttacagtgaacttgaagcgattgagcatatctttgaagagcttgacggaaacgaaggcttgcttgtggcaagtaagattgcggaccgtgtcggcattacgcgttcagtaatcgttaacgcgctgagaaagctggaaagcgcaggcgtcattgaatccagatcactgggaatgaaggggacgtacattaaagttctgaacaacaaattccttattgaattggaaaaccttaaatctcattaagacaaaagcaggatccctgaaaatgggagtcctgctttttttatggacaataggtgaaaagttgcagtttaaagttgcttattggaatctgatctgagataatccatcttgctgtgtgaaaaaaggaggaagaaacagaaattctgctattttcagtcttatattaaacaaatccttgtagtacaaatattctaggacttaatacctacatgcaaaatagatataattgagcacttttttttagtctaacttcatagactttaagcctgttatttcttacaataagcatatggttttacaattctcgacaaggatttttaggagaaaaatatctgaaatggaggtaagtggatttggacttattttctggaactatacaaaatcttgagaatgccttggggagagcggacattaagcaaaaagtcttaactaataatatcgccaatatagatacaccgaactataaggcaaaaaaagtctctttccgaaatttgttagatcaggaaacatccaatcttgaggctgtaaaaaccgactatcggcacgttgactttacgggttcgggggacgattattctatcgtgtccagcagtgatacatcgtaccagcaaaacggaaacaatgtcgatatcgacaaagaaatgacagatttagccgaaaaccaaattaattatcaggctttggttgaaagaatgagcggcaaattcaattctctgaaaaccgtcttgacaggaggaaaataatgagtggctttcaaagcttaaatatttcgggttccgctttaactgcacagcgtgtccggatggacgtcgtatcgtccaacctggccaatatggatacaacgagagcgaagcaggtaaatggcgaatgggtgccttacagaagaaagctggtatctctccaatccggaggcgaatcattttcgtcccttttacattccaagatgaacggaacaggaagcgcgggaagtggcgtaaaggtatctggtgttacggaagacccgtccgcttttaatctcgtttatgatccggagaatcctgatgcgaataaagacggatatgtacaaaaaccaaatgtagatccattaaaggaaatggtggatcttgtcagcagctcgagatcatatgaagcaaacgtaactgcattaaacgcctccaaaggcatgcttttgaaggcgttagaaatcggaaagtaaggtgatgtaagtggttaacgctattactccttttcagcttcaacaaacccaaaatactcaaaacgtaacgaatcaattaaaccaaactcaaaaaactgattcttcaaaccaaacaagcttttcggagcttttaaaaaactctattgattcgttaaatgagtcacaagtgaaatctgaccaaataacgaacgaactggctgcaggaaaggatgtaaaccttgacgaggtcatgatcgctgcccaaaaagcaaatatttctctgacggccgctaccgaattccgcaataaagccgtggaagcctatcaggaaatcatgagaatgcagatgtagtggtcagattgaagagaatgactggaatgaccgggggttaacatgaatcgtactctaatgcaaatgaaaaccaaaacggcagcgttttggaacaacagatcaaaaacacagaagatactcatggtaagcggcttggccgcattcattattttactcatcgtcgttattatttttacttcgtctgaaaagatggtgcctctttataaagatttgtccgcggaagaagcggggaagattaaagaagagctcgatacgaaaaaggtgtcttctgaacttgctgacggcggcacggtcattaaggttcctgagagccaagtggattcgcttaaagtccagcttgccgcggaaggcctgccgaaaacgggatcaattgattattcgtttttcggacaaaatgcgggcttcggcctgacggataatgagtttgacgttttaaaggttgaggcgactcagacggaattgtcaaacctgataaatgaaatggacggtattaaaagctcgaaggtcatgatcaacatgccgaaagaagccgtgttcgtcggtgaagatcagccggcagcgtccgcttcaatcgttttgcagatgaaaccgggctactcgcttgatcaaaaccagatcaacgggctgtaccacctcgtttctaaaagtgttccgaacttaaaagaagataatatcgtcataatggatcaaaattctacatattatgacaaaagtgacagcggtgcagggtccgtttctgacagttatgcttctcagcaaggtattaagtcgcaggtcgaaaaggacattcaaaaacatgttcagtcactgctcggcacaatgatggggcaggataaggtcgttgtttccgtgacggcggatgttgacttcacgaaggaaaaacgcactgaagacactgtcgaacctgtcgataaagataacatggaaggcatagcggtaagcgccgaaaaagttgcggaaacgtataaaggcgacggcgcggccaacggcggcacggccggaacgggaagcaatgacaccgcgaactatgccgagacaaacggcggttccaacagcggggactacgaaaaaagcagcaataaaatcaactatgaagtcaaccgcattcataaagaaatcgctgaaagcccgtataaagtgcgtgatttaggcattcaggtcatggtggagccgcctaatccgaaaaatgccgcttccttatcagcacagagacaggctgatatacagaagattttaggaacggtcgtcagaacgtctcttgataaaaacgaaacgcaaaatcaaaacctgacagacaatgatatcaacaataaaatcgttgtatccgttcagccgtttgacggaaaaacaagcctgaacacagattcggcacaatcttcaggtcttccgatctgggtatacattacaggcggcgtactgcttgcggccattattctgcttattattctcctcatcagaaagaaacgctcacaagaggatgaatacgaagaatatgaatatgaaacaccgcccgagccggttcgattgcctgatatcaacgaagagaaaattgaaacggaagaaacagtcagacgaaaacagcttgaaaaaatggctaaagaaaaaccggaagactttgctaaattgcttcgaagctggctggacgaggattagggggaatggaaaatggcgaaacgtgatcagaacaagcttacaggaaaacaaaaagcagccatcctcatgatttccttaggccttgatgtatcagcttctgtgtacaagcatttgtctgaagaagaaattgaaagattgacactcgagatttcgggagtcagaagcgtcgatcatcaaagaaaagatgaaatcattgaagaatttcataatatcgcaatcgctcaggactatatttcacaaggcggtttaaattacgcccgccaagtgcttgaaaaagcgctcggagaagacaaagcggtaagcattttaaacaggctcacctcttctttgcaggtaaagccgtttgatttcgcgagaaaagcggagcccgaacagattttaaatttcattcagcaggaacatccgcaaacgatggcgctgattttatcctaccttgacccggtgcaggccggacagattttgtctgagctgaacccggacgttcaggctgaggtggcaagaaggattgcggttatggacagaacgtctcctgaaatcataaatgaagtggagcgggtccttgaacaaaagctgtcctcctcctttacgcaggattatacgcagaccggcggcatagaagccgttgttgaagtgttaaacggcgtagacagaggaacggaaaaaacgatccttgattcattagaaatccaagatcctgagttggcggatgaaatcaaaaaacggatgtttgtctttgaagatattgtcacccttgataaccgtgcgattcagcgcgtgatcagagacgttgaaaacgacgacctcctgctttcattgaaggttgcgagcgaggaagtcaaagaaatcgtcttcagcaatatgtcacagcgtatggttgaaacgtttaaagaggaaatggaaattatggggcctgtgcgtttgcgtgatgtggaagaggcgcaatcaagaatcgtgggcgtcgtccgcaagctggaagaagccggagaaattgtaatcgcgcgaggcggaggagacgatattattgtctaatatcattaaacagcaatcatcattttctcctgaacaaaaacggcgcaagctttccttgcaggaagtcaggaaaacacattcccatccagaccgggaggaacccgaaaatccggaggctctcatggcttttgccaaagcagaagccgacagggtgtctgaagaagcgaaaaatcaattagagcacactcttctgcagattgaagaagcgaaaaaccgctgggcggaagaaaaacaaagattgatagaagaagcaaaggcagaaggatatgaagaaggcatggcattgggaaaagccgaggctcaagctgaatacgccaatctcatcagccgggccaatgccgttatggaaatggcgagacagtcagtcgaggaaaaactggaaagcgctgaggaagaaatcattgagctttccgttgcgctcgctaaaaaagtatggcggcaaaaaagtgatgataaagaggctttccttctgctggtcaaacaggtagtagccgaagtgaaagattatgatgacatctccatctatgtggaccctgaatattatgagacggttcatcagcatatggacgaaattcagcagctgttatacaaagaatgcagattaagcttatatgccgatgaaaaagccgcgaagggaacgtgctcgatagaaactccgttcggacgtgttgatgcaggcatagacacccagctgatgcaattaaagcaaaagcttttaacggcgcttgaggcgggagcggagcaatgaagacacagtatttaatagactcaattgaaacagcggatccgtacaagcgctacggcaaggttaaacgggtcatcgggctgatgattgaatcaaaagggcccgaaagctcaatcggagatgtttgtctcatttatccgaaaggccatgcgaaaaaagcgattaaagctgaggttgtaggcttccaagatgaaaacattctgttaatgccttatctggaagcggccagcatcgcgccgggcagcattgtggaggccactggggagtcgctccgcatcaaagtaggcgcgggtttaatcggacaagttgtcgacgcgttcggcgaacctcttgacggccgggcgctcccgaaaggtttgtcccccgtttcgacggaacagccgccgccaaacccgatgaaacgcccgccgatacgggaaaagatgggtgtcggcgtaagatcgattgacagtctgctgacggtaggaaaagggcagagaatcgggatttttgccggaagcggagtcggaaaaagcaccctgatgggaatgatcgcgaagcagactgaagctgatttaaacattatcgcactcgtcggggaacgggggcgcgaggtgcgtgaattcatcgagaaggatttaggcgaagaaggcctgaaacgctcgatagtcgtagtcgcgacctctgatcagcctgccttaatgcgtttgaaagcggcgtatacggccaccgccattgcagagtacttccgcgataaaggccggaatgtgatgttcatgatggactccgtcacgagggtcgcgatggctcagcgggaaatcggcctggcagcgggagaaccgccgacaacaaaaggatatacaccttctgtgttcgctattttgccccgtttgctggaaagaacgggcgcgaatgaacaaggaacgataaccgctttttatacggttctcgtagacggagatgacatgaacgaaccgattgccgatacggtgcgcggaatattagacgggcatatcgttctcgatcgggcgcttgccaacaaagggcagttcccggccgtgaacatcctgaaaagcatcagcagggtcatgtctaatatttcagacacagcgcacaaagaggcggccaacaaattccgcgatcttctgtcaacttatcaaaactctgaagatctcattaatatcggagcttacaaaagaggatcatcaagagaaattgatgaagcgattcagttttatccgcagcttattcaatttttaaaacaaggaacggaagaacctgctcaattggaagacagcattgcggcattgacgagtctgactggaaaagaggaataaacatcgtggcataccaattcagatttcaaaagctgctggaattaaaagaaaatgaaaaagaccaaacattgactgaatacagacaatcggtttctgaatttgagacagtggctgaaaaactatatgaaaatatgagcaaaaaagaattgctcgaaaaagacaaagaatcaaagctgaaatgcggaatgagcgttcaggaaatgagacattatcagcaattcgtttccaatcttgagaacaccatctatcattatcaaaagcttgtcatcatgaaacgaaatgaaatgaatgagaagcaggaacagctcaccgaaaaaaacattgaagtaaagaaatttgaaaaaatgcgggaaaaacaatttaatatgttcgcacttgaagacaaagctgcagagatgagggaaatggacgacatttcaatcaagcagtttatgattcaggggcattaggagcgaatgaaatggccgataaagaaaagagatctggaaagttcggttcaatcctgctttttatcatgatcccgctgatttttctgatcatcgtcgcaagcatcatcctttgggctgccggcgttgatgtgatgaagccgattcaggaaacagccgctaaaacgcctgttttaaatgaattggttcccgaaacgaaagaaatgaaaagcgcggcggaaaagcagaaggtagacagaacggcttctcttgaaaagaccataaaggaacaaaaaagtgaaattaacattttgaataaagatttagacacaagcaagtccgaaatcgataatctgaatcagaaaatccgttcactgaaacaggaagctgaacagcagcagaaaacgaagacggatgaaacgaaaaaagacgctgcggattcagccggaaaagataaaatgatcaacatctataaaagtatcgacagcggtaaagcggcaagcattatcgtaaagctgaaagaaaaagaagccctcgatattttaaacggattaagtaaaaagcagcttgctgaaatcttgacgaaaatgactcctgaacaagcggctaaatatacagaaaaactatccgctgacggaaataaggagtgatgtaagttgaagctgcctgaattaacgggtaatcgtacgcagactgtgcaaaacagcaatgcgaagatgaatgtaaacagcttaggtctatttcagaactggctcctgtcggaaatcacttctccccggcagcccggagatgaaaccaaaacaagtgacgcagagctgaatgatgccctatcgaaaatcggtgattggctgaaagccggcccggaagataaagaattgcagctaaaaaagctgcttgaggcggtaaaagctcttgaaggaaagcagacggctgaaacagctcttcctttattgaaacagcttgccgaatctgtagaagacatgttagcgggcaaacagcatggggcgaagcctgaaacggatgagccggattcttccgcaaaagacggggattccgtcaaggatgcgcttgagaagggtctgcttttcattcaagaagccgtatcccagctcttcacatctcagcaggaactgccggacagcgcgcaggcaaaggcggtttaccaggaaggcgcccgtttattagaggcattgaaaaaacaaggtgtcccagaccgcgtgattcaagacctgcggcagacattttttccgaaaaacgaatctgcatctaaactttactccatgacagccgctgagctgaagagctttcaaagcgtcgcggagcagcttgcgggcctttctcaaaagggaacaaaggaatgggatatggctgaaactgagctgaaagcttttgtgttatctcaatcatctgaatcatcccaagagtcagccgggaaaacagaacagcaaaacggcggcacggttactcacgcaaaggcgcctgacagcaaattgtctgcacatatactgttttcgggaacgagaagccttgccggcattcagcaaacgtccgcaggagctgaacagcagccggcagaaaataaaccgttaacggatcaggtcatcagcggctggaaacagatgaaatacacgcctttcgggaaaacaaccggaagctttacgattcgtcttaatcccgagaacctcggatttgtcacaattaaggtgacaaacgaaaacgggatgtttcaaagcaaaataatcgcatccagccagtccgcgaaagagctgctggaacagcatcttcctcagctgaaacagtcgcttccgaatatggcggtccaggtcgaccgttttacagtcccgcttcaaagcggggatcagcagcctgtttacgggcagacggccgatcacaataaacagcagcatcagggacagagagagcagaagaaccagcagcagtcaggcgatttcggagatatgctggaggagctttctatcaatgaaatggaggaagaatagttgacatcagtaaactcggattatgccgcggcgggcgcttcaaccacttcaagcgcgaagagcacctccgcagtaaacagcagcacgaatttagggaaagacgaatttctgaagatcttaatgacacaggttcaaaaccaggacccgctcaatccggttgatgacaaagaattcatcagccagatggcgacattttcttcattggagcaaatgatgaatatgaatacgacgatgactaaatttgtagaaaatcaagatccgtttacgatgtatgtgaactggatcggcaaaaatgtcacattcagcgacagcgacgggaaggatcagacaagcccggtcaattcagtcaagcattcaaacggcaattacgtgctcgtgcttgaaaacggcaaagaggtcagtccgtggaatgtcacggccgtcagcgaaacatctaaataataagaaactcagggggaatttaacatgttacgttcattatattccggtatcagcggcatgaaaaactttcagacaaaactagatgtaatcggcaataacatcgccaacgtcaacacagtgggatttaagaaaagccgcgttacatttaaagatatgatcagccagacagtcgccggcggttcaaacgtgaccaattcaaaacaaatcggcttgggtgccgcgacttcttccattgatgttgttcattcaaccggcgccccgcaggctacacagaataaaaccgacctagccattgacggagacggctactttcagattaatacaggtgcgggaattgtttacacacgtgcggggaatttcggaaaggacaatcaaggaaaccttgttacgactgacgggtactatcttgaaaaaatcggcggcggcaaaatcaatattccgactgatgcgaaagattacagcatcggtgcagacggaaccgttacatacactgatgcaggggatgaggttcatgatgccggacaaatcggtctggtcacgttccctaacagcgccggtctggaaaaaatcggaggaaacctttacagagaatcattaagttcaggagctgcaagcgcagtcaccactccgggcgaaaacggaacgggtaagcttttggcaggctatcttgaaatgtcaaacgtagatctgacagatgaatttaccgaaatgatcgttgctcagcgcggtttccaatcaaactcaaaaatcattacgacttcagatgaaatccttcaggagctggttaatctgaaacggtaaggagggaggagaggcggttaggccgcttctccggattgcatgattcaagtcacccgtttaaacggccagccttttacgctgaacgcgctgtttatcgaacagattgagtgcttccccgacacgacgattacactgtccaacggcaaaaagttcgtagtgaaagaaccggaagaagcagttctcaaaaaagtcatatcgttttaccatagcatacaaatattttcactggatcagggaatagaggaagaagaatgaagaaaaaattagtcatcattttgctgattattttaattgtcatcgccggcctcggaacggcagcatattttgtcgtcagcggaaattccggcaaagataaaaagccgacaattgacgaagtcgttgcagccactgtgtctgtcgacgatatcacgacaaacttaaagtctgacagcatcatccgtatcggcatcaagcttgaaaccgactcggctaaagcgaaggaagaacttgaaaaacgcgattttcaggtgaaagacaatatcatttccattttagctgacacaagcgccggagagattgagggagataaaggaagagaagcgtttaaacaatcattaaaagagaaagtaaacagctatctccaagaaggaaaagttcagaaagtgtacattacctcctttaatctgcaataaaaacaaatttgacagaatacggaggtgaagaaaatgtcaggagaagttctctcccaaaatgaaatagacgcactgctttccgccatttccacgggtgaggcggatgcggaagagctgaaaaaggaagttaaagagaaaaaagtaaaggtatatgattttaaacgggctctcagattctcgaaagatcagatacgcagtttaacccggatacatgataactttgcgaggcttctcacaacacacttttccgccaagctcagaacgtatattcatatatccgtcagctcagttgaccaggtgccgtatgaagaatttatccgttccataccgaacatgacgattttaaatttattcgatgttcatccgatggaaggcagaattatgatggaggttaatcccaccatcgcatacgcaatgcttgaccgcgtcatgggaggcatcggcatcactcataacaaagctgacagccttacggaaattgaaacgaatattatttctaacttatttgaaaatgcactgggcaactacaaagaagcgtggcaatcgattgctgatattgaccctgaaatgactgaatttgaagtgaatcctcagtttgtacagatggtttccccaaatgaaacagtcgttgtcatttctctcaatacgcagataggtgaaatcagcggtgtcattaatctttgtattccccatgtcgtacttgagccgattatccctaagctttccgtacattattggatgcaatcagaccggaatgaagcgaagcccgaagaaacgaagttgcttgaaaagcgcatcatgacggctcaaattcccgttgtggctctcttgggcgcttctgaactgacaatagaagaatttttaagtttggaagtcggggactgtataactctggacaaatcagtgactgatcctcttactgtattggtcggaaacaaaccgaagtttttagggcaggccggccgggtgaatcgaagacaggcagtgcaaattttagatcacgacataagaggtgaacaagatgaacaatagattatctcaagatgaaatcgatgctcttcttaacggcacaagcagtcagtcagaggatacagaacagcctcaaggggcgaacttgtctgaacttgagcgcgatgcgatcggagaaatcgggaatatttcgttcggcagctcggctacggcgctgtccactcttttaaatcaaaaagtggacattacgaccccgagtgtgaccgtcatttcaaaaagcaaaatcagtgatgaatttcctcatccgtatgttgccattgaagtgaactacacagaaggctttgacggcagcaatttgctcgtcgtcgaacaaagcgacgcggccatcatcgcggatttgatgatcggcggggacggccggggcgccgatccgtcactcggtgaaatccacctgagcgccgtgcaggaagcaatgaatcaaatgatgggctcggctgctacgtcaatgtcgaccgtgttcagtaaaaagattgacatttctccgccaagggttgaacttctggatgtgacggaagaaaaagggaccgacagaatacctgaggatgacctgctcgtaaaagtgtcattccgtctgaaagtcggcgaattaatcgattcgagcatcatgcagctttatccgattacgtttgcgaaagatctgatcgcagacctgatgactgcagaccagcatgagtcagaggccgcagaaactgtatcagaacctcagcaaacatacgaaacgccgcagccggaacctgccatgcagctggagccgcaggcaaaacccgagcttccgaagagacagggaaccgcaaaaaaagctgctcctgttcaagtcgctccggtagaattccaggcgtttgatcataacgaagcggcgcaaggatcaaggaataaccttgatatgctgatggatattccgctttccgttacggttgagctcggcagaacgaagagaagcgtcaaagaaatccttgaactttctgcgggaagcattattgagcttgacaagctggctggtgaacctgttgacattctggtcaaccagcggatcgtggcaaagggcgaggtcgttgtcatagaagaaaacttcggcgtgagagtcactgatattttaagtcaggcagaccgccttaacaatttaaaataagcgaacatagaggagagaaacagattatggcacacagaattttaattgtagacgatgcagcatttatgagaatgatgatcaaagatattttagtgaagaacggttttgacgttgtagctgaagcttcagacggagcgcaggcagtcgaaaaattcaaagagcattcccccgaccttgtgacaatggatattacaatgcctgaaatggacgggattacagctttaaaggaaattaaacaaatcgatccgcaggcgaaaatcatcatgtgttcggctatgggccagcagtcaatggttattgacgcgattcaagccggcgcaaaagactttatcgtgaaaccgttccaagcggaccgcgtgcttgaagctattaataaaacattaagctaaagggtgtacgactgttgaaaaagagtcatggtttactagctttgatttgttgtttcgttttactcaatgtacatccgttccctgcttttgcggcggagtctgacaattccaccgtcaacgaatggtttgacaaacaatcaacaaacaaaacagagaaaaaaagcgatacatcgaaacaaacggctgatcaagagataggggatgcttctgcatcttctgtctccgcttttgattttgtaaagatgattggggcgttattattcgtcattctgctgatctatggatttgtcaaactgatgaatagaagaaaccgtctgctgaagccgtttcaatatgtagaaaatatcggcggaacgtcagtcggccaaaaccgttccgtgcagctgattaaagtgggaaacagtgttctcgtagtcggtgtgggcgaaacgatacagcttttaaaagaaattgaagatgaaaaagagcgcgaggcgattctgagccaatacgaagagtcgatgtcttcaaaagtggaatggaccaagctcgtaaatcggcgtaaggatggagaaaaaaagccgcaaacgatgcttccgtcgttttcaaaagcgctgaaagaacagctgaacgagctgaaacaaagccgttctgaaggaaagaagaaaggcccttatcatcatgaatgaatttattaatctttttaattcaagcagtccgaccgaagtcagctccactgttaaattactgttgcttttgactgtcttttcagtggcgccggggattctgattttgatgacctgctttacgagaatcgtcatcgtcctgtcttttgtaagaacctcactggcgacgcaaaacatgcctcccaaccaggttttaatcggccttgcgctgtttttgacgttttttattatggcgccgactttttcagagattaataaggaagccttaacgccgctgatggacaataaaatcagtctcgatgaagcatatacaaaagccgagaagccgattaaagagtatatgagcaagcatacaaggcagaaggatctggcgctgtttatgaactatgccaaaatgaaaaaacctgaatcgattcaggatattcctttgacgacgatggtgcccgcttatgcgatatcagaactcaaaaccgcttttcaaatgggctttatgatttttattccgtttttaattatcgatatggtcgtggcgagcgtcttaatgtcaatgggaatgatgatgctaccgccggttatgatctctctgccctttaaaatattgcttttcgttttggtcgatggatggtatttaatcgtgaaatctttgcttgacagcttttagggtaggtgctaattgtgagttcagaatttgtaatttccatggcggaaaaagccgtatatgtaacactaatgatcagcgggccgctgcttgcgatcgcgctgatcgtcggtttgctcgtcagtatctttcaagcgacaactcaaatccaggaacagacgcttgcgttcattccgaaaatcgtggcggtgatgcttggactgatctttttcggtccttggatgctgtcgacgattctttcgttcacaactgatctgttttctcatctgaaccgatttgcagggtagaatcaaatgaattccatcattgatttatttcccgcttttttattggtctttatcagaatctctgctttttttgtaacggtgccggtgttcggacatcggaatctgccggcggttcaccgaatcggctttgctttttttctttcggtgatctgcttcagcacgctgaaacatgcgccggaaatagaaataggggaacagtatatgctgcttgtcataaaagaggccgttgtgggcttgagcctcgggctgatcgctttcatgatgatgacagccattcagatagcaggttcctttattgattttcagatgggcttttccatcgccaatgtcattgatccgcaatcaggaacgcaaagcccgctgatcggacaattcgtttatacgctggcgctgttatttatgctcagcgtaaacgcccattatcttttattggacgggatttattacagctttcagtatatcccgcttgatcaggcatttccgtcgtttggaaatgatcactttggactttttatcgcaaaaagcttcaatgccatgtttattatcgcttttcaaatgtctgcgccggttgtggccagtctgtttttagttgatttggcgctcggtatcgtggcgagaacggtgccgcagctgaatgttttcgttgtcgggcttcctctgaaaatagccgtgagctttattatgctgatcgtttgtatggcggtgatgtttgtcgttgtccgcaacatcttcagccttaccgttgaaaccatgcggaatctattggcattggtcggtgtgacatgatgaggctcagactgaatctgcaattctttgccggtgaaaaaacggagaaagccacgccgaaaaaacggaaggatacaagaaagaaaggacaggtcgcgaaaagtacggatgtgaatacagccgtttctttactgattatctttctttcgctgatcgcgctcggtccttatatgcgggacaggctgctgtcctttattaaaacgttttatacgaaatcgatatcattacatctgtctgcatctgccgtgcatgaactgttcgtggatacggtgaaagatatcagcctcatcctcgcgccgattatgctggtcgcgcttgtggcaggtgtcgtgagcaattacatgcaggtgggttttctgttttctgcggaagtcctcaagcctgacttgaataagctcagcccgctgaaaggatttaagcggatttacagtatgagggcgattgttgaactggtcaaatccattttgaagattactgtggtcggttttgccgcctttatggtgctctggctgcattatggcgatattctccgccttccgcttttgactcctgcggaagtgctcactttcgtttccaagctcactctttggatggggcttgcgggatcaggggctttaatgctgctggccgggcttgattacttatatcagcgttttgattatgagaaaaatatcagaatgtcaaagcaggatataaaagatgaatacaaaaaatcggagggtgatccgataatcaagtccaaaattaagcagaagcagcgggaaatggcgatgaggcggatgatgcaggaagtgccgaaagcggatgtcatcattaccaacccgacccattatgcgatagctttaaaatatgatgaaaagaaaatggacgccccttacattgttgccaaaggggtggaccatctcgcattaaaaatcaggcagatcgccaaagaacacgatgtcatgacgattgaaaacaggccgctcgcgcgtgcgttatatgatcaggttgacattgaccaggccgtgccggaagagtttttcaaagtcattgcggaaattttggcttatgtatataaaacgaaacaaaaagtatagtgaatttcagattcaaaaggagagaaaaacagcatgtcaacaagagatttatcggttttaataagtgttgtcctcattgtggcaatgctggtgattccattccctccatggttgttaagtattttgatcatcattaatatctctcttgcgttgatcgtgcttctcaccacaatgaatatgcaagaaccgctgcaattctcgatattcccgtcattgctgctgttattgacgctgtttcggctttcgctcaatgtgtcgacgacacgttcgattctttctcacggagaagggggaaaggttgttgagacattcgggaatttcgttgtcggcggaaatgtgctggtagggcttgttgtcttcattatcttgattattattcagtttatcgtcattacaaaaggcgccgagcgggtatcggaagtggcggcgagatttacgctcgatgcgatgcccggaaagcaaatgagtattgacgcggatttaaatgccggcatgattacggagcaggatgcaaagcacagacgtgaaaaagtcgcccgggaagcggatttttacggcgccatggacggtgcgagcaaattcgtcaaaggggatgccatcgcgggtatcatcatcgtgatgatcaatattattttcggaatcgtaatcggcatgctgcagcaggggatgagcatacaagaagctgcgtctcactttacaatgctgacggtcggtgacggtatcgtttctcaaatgccggccttgctcatttcaacggctacggggatcgtcgtgacgagagcggcatctgaaggaaacctcggtcatgatattacaggccagctgtttgcttatccgaagctcttgtatgtagctgcgggaactgtacttttgctcggtcttcttacaccgatcggcattctgctgacggggccgatcgccggtctgcttgcattcggcgcttacatgctgtccaaagcggataagccgagcgaagaagaggaagaaattcttgaagaagaggctcaggcggatgaactgaaaagcccggaaagcgttgtgcagcttttacatattgatccgattgaatttgagttcggatacggactcgtgccgcttgcagacgcggggcagggcggtgatcttcttgaccgcatcgtcatgatcagacgtcagcttgcgcttgaattgggacttgtcattccggttgtgcgcatcagagataacatcgcgctccagccgaatgaatacagattgaaaattaaaggcaatgaagtcgctaaaggagagctcctgctggatcattacttagcgatgtcaccgacgcctgaagatgacgtcattgaaggaattgaaacgatagagccgtcgttcggacttcccgcaaaatggatcagcgaagctgcaaaagatgaagcggacatgctgggatatacagttgttgatccggcatcagtcgtatctacgcatattacagaaaaaattaagcagcatgcccatgaactggtcggcagacaggaaaccaagcagctgatcgatcatctgaaggaaaattatcctgtgcttgttgaggaagtcacgccaaaccctctttctgtcggcgatattcaaaaggtgcttgccaaattgctgagagaaaaagtttcaatcagaaacttggtgaccatttttgaaactcttgccgattacggaagattaacgacagattcagatcttttgacagaatacgcgagacagtcgcttgccaaacaaatcacggcgcaatatgcgagagagcatgaaacgctgaaggtcatcacatgctcaggccgggtggaaaaagcgattgcagacggggtacagcagactgaacagggcaattacctgtcactcgaccctgaggtttcagacagcatcatccgttctgtcgctaaagaggccgagcagctttccatccgccaggagtcggcgattctgctctgctcgcctgctgtcagaatgtatgtaaaacagctgttagaacggtatttccctgatcttccggttctttcttataatgagctggaagcaaatgttgaagtacagagcattggagtggtggatatttaatgaaaataaaaaaatttacagccgcttcaatgcaggatgccgcgaagcaaatcaaaaaggaactcggcaatgatgccgttattttacattccaaacaagtaaagaaacgaaaatggctggggctgcggtcgcagcaggccgtcgaagtgatagcggttttagatcgtgacgtcagggaagcgagaaaaacgccgccggctgccgctgaagaaatgaaaaagacgaaaacggcggagaaagctgagcctgttcagccgccgcgccttccggatcaaagtatttccggcgaactggcgcattttaaagaagtgttccctgaaccattaaaaaaagccgagagactattgaagcaagccgggcttcctgatcatacgcaaaacgccgtactcagtgaattgctccgttcttcaattgtttccggagatttaactgaagataatgtcagctccaaactgcaggatttgttagtgaaaaaactcccttcggcagacaggtggcaggaagggattcaatcaaaatacgtcgtgcttttcggttcaaccggggccggcaaaacgactacacttgcgaaactcgcggcctcatcaatgctgacagagcataaaaaaattgcctttatgacgacggatacttaccggattgccgcggtcgagcagctgaagacatatgcggagctgcttcaggctcctcttgaagtatgctattcaaaggaagaatgtctgaaggcactggaaaaattcgctgaatatgaccatgttttcattgatacagccggtagaaactttaaagaagagcagtatattacggaattacaagagatgattccgtttgaatcaggcttacaatcctttctcgtattatcggcatctgcaaaatatgacgatatgaaacaggtgctgaaacagttttcaggtgtgccggtcaatcaattcattttcacgaaaacggatgaaaccgcctcactcggctccgtgtttcaagtgctgtcggaatcaagaatcggcgccgcctatttgacaaatggacaggatgtgcctgaagacatcctatcggcttcaccaaaagagtttgtaaggatgcttttgacatgaaacccgatcaggcagagtcattaagaaggaaaatgagagagcggcaaatgatcaagccggagctttatgagaaaaaagcgaagacattagccgtcatcagcggtaaaggcggcgtcggaaaatctaatttaacattaaacatggcagttgccctgcaggaaaaaggaaaaaaagcactcatcattgatcttgacatcggaatgggcaacattgatgtgctgatcggcgctgcttcttcccgcaccattattgatgtgatggagaatcggcacgcattggcgcaatcactgtcctccggtccgaaaggccttcgctacatatccggaggaacggggcttgaggcgatctatcaagcagacggagagaagtgggaggcttttatgaatggtctttccgctgtattaagcgattttgattacgttctgtttgatatgggagcgggactttcaaaagaacagctgccgtttattttatcggcggaagacattctcgccgtgacaacgcctgagccgacggccattatggatgcctacagcgcgatcaaacatctcttgctcgcggatgaacggctgaccgtaaacattgccgtcaatcgcgcccgcgaccaaaaacaggcgctggacacgtacaaccgcctttctcatgcgattcacacgtttttaggcgcggaggtgcgtttcgccggctccatacccgatgacccgctagtaagtcaagccgtcattgaccaggtgccttttttaataaaaaatcctcaagcaaaagccagcaggtccgtccgtcttctgacggatgtcttgtttcaaacggaagaaaacaaaccaagagaagagaaaccggcatttattgagagattatcttcttttttattgaggaggactttacagtgattcgtgtgcttgtcgttgatgactcagcttttatgagaaagatgattaccgattttctggctgcggaagtgcagatagaagtcatcgggacagccagaaacggggaagaggcgctgaagaaaatagagcttctcaaaccggatgttgtcacgcttgatattgaaatgccggtcatgaacggaacggatacattgcggaagatcatcagcatatataaacttcccgtcatcatggtatcgagccagacacagcaagggaaggaccgaacgatcaactgcctggaaatgggcgcttttgattttatcaccaagccttccggagcaatttcacttgatctttataaaattaaagagcagctgattgagagggtgattgcagccgggctgtcccgcgcacaaaaacctgaggcggcagtgaaagagtcttctatcccggaacgtccggctttggcgggatttgaaagaccgaaagtaagatccgccaagcaggccgtattcatcgcgacctctacaggcggaccgcgggctctgcaaaaggtgattccgaaactgccgaaggatttaaaggcgcctgtatttgtcgttcagcacatgcctgaaggcttcaccgcttcacttgcagacagactcaaccatttgtcagatattcaggtcaaagaagcggaaaacggtgaagaagcgaaagacggatgggtgtacatcgcgcccggcggaaaaaatatgacggttgcagaggaaggcggaaggctccgcatcattcttgacgttcatgatacggaaagccggcataaaccgtcagccgattatttgtttcgttcggcaagccgcttatccgattacgaaaaggtagccgtcattatgacaggcatgggcagcgacggaaccgagggcgtaaaagaaatgctcagaacaggcagcgttaaaacgattgcggaatcggacgaatcctgtgttgtgttcggaatgccgaagtcagcgataaaggcgggcctcattcatgagattaaacatgtggaagatatcgcggcatccatcaccggatgtgtgaaaaaagagagggtgtgaatcaattggatatgaatcaatatttagatgtctttattgatgaaagtaaagagcacttacagacatgtaacgaaaagctgctgctgttggaaaaagatccggcagaccttcagcttgtgcatgacatcttcagagctgcccatacgctgaaaggcatgagcgcaacgatgggatatacagatctggcgcatttaacccacctgatggaaaatgtgctggacgccatccgcaacggagaaatgcccgttacatcagattggctggatgtgctgtttgaagcgcttgatcatcttgaagagatggtgcagtccattattgacggaggagacggcaaacgtgatatttctgaagtgagtgcgaagctcgacgtaaatgcggtgcatgagactgcggcttcagccgaaacagcagaaccgccggcttcaaaacaacaggcttcaactgaatgggattatgacgagttcgaacggactgttattgaagaggcggaagagcaaggattcagccgctatgaaataacggtttccctgaatgaaagctgcatgctcaaagccgtgcgcgtgtacatgatatttgaaaagctgaatgaagccggggaagtcgcaaaaacgatacccgccgcggaagtgcttgagacggaagatttcggaacggattttcaggtgtgtttcttgacaaagcagcctgctgaagaaattaaagaactcatcagcggcatttcagaagtggagaatgtcgaaatttctgccggtgcgccgttaaaaacggccgaaaaaccgcgagcggctgaaccggtgaaggaagctccggttaaaaaggctgagaaacagcctaagccgcaagcgaaaacggaagaacagccgaagcatcacagcggctcgaaaacgattcgcgtcaacattgaaagactggattcttcaatgaacctttttgaagaacttgtcattgaccgcggacgtcttgagcagatcgccaaagagcttgaccacaatgagctgactgaaaccgttgaacgcctgaccagaatctcgggcgaccttcagtctattattcttaatatgcggatggtgccggtagaaaccgtctttaaccgtttcccgagaatgatccgccagcttcaaaaggaattaaacaagaaaatcgaattgtccatcatcggagctgaaacggagctggaccgcacggtgattgatgaaatcggcgatccgcttgttcatttaatcagaaacagcatcgatcacggcattgaatcgcctgaagtgcgggtgaataaaggaaaaccggaatcaggtcatgtcgtgcttaaggcatatcacagcggcaaccacgtctttattgaggttgaagatgacggggccggcctgaacagaaagaaaattcttgaaaaagcgctcgagcggagtgtaatcaccgaacgtgatgctgaaacgcttgaagataatgagatttacgagcttatttttgctccgggcttctcgactgccgatcaaatttctgacatttcagggcggggcgtcggcctggatgtcgtaaaaaataaactcgaatcactcggcggctctgtcagtgtcaaatccgcggaaggtcaaggttctcttttcagtatccagcttccgctgacactttcaattatatccgttcttctcattaaactggaagaagagacgtttgcgataccgatttcttctattatagagacggctgttattgataagaaagatatcctgcagacgcatgacagagaagtgattgatttcagaggccaaatcgttccgatcgtctatctgaaaaaagaattcggcattacggattcaaaacaggatgccgatcagttccatgtaatcgtcgtgaaaaagggcgataaatccactgcttttgtcgtggattcttttatcggacagcaggaagtcgtactgaaatcactcggcgactatttgacgaacgtctttgcgatttccggcgctacgattctcggaaacggagaagtggcgctgattattgattgcaatgcgctgatctactaaaacgacacgaggaggtgcccgaatgactgctgaaatcaaaacaggtgaaaaaatgattgtgtttatgataaacgggaaagaatacgctatctcagtttcccaggtgaaatcaattgaaaagtggcaaaaaccgacgagggtcccgggtgtggaatcttatatccgcggcgttatcaatctgcgcggagtgattaccccggttcttgatttaagaaaacgtctgaatcagcctgaacaggacatcacagaagagactcggattatcatcatttcttatcgtgacgccgatgtcggatgggtcgtggatgaggccaatgacgtcatcaccgtgcatgaaaatgaaatcgaatccgcgcctgaaagccagacaaaggaaacggatgtgtggattaaacagatcgtcaagcaagataacaggctcctcaatattatcgatgcgcatgcggtactggataaaggtgcttcggcatctgcgtccggagagcctaatgcttaaaggggaaaagacaacatgagtaagtttgaagcgatcaaagaagagcagatggatattttgcgggaagtcggaaatatcggggcgggtcactcggcttctgcaatggctcagctgctgaacagaaagatagacatggaagtgccgtttgcgactttattgacatttgatgagctcgctgattttttcggcggggctgaaacgccggtcgccagtatctttttaagaatggaaggcgacatgaccggctctatctttctcatcatgcctttccatcaggcggaacagtttatcagagagctgatcggaaatccggattttgatattgaccagttgggtgaagatcatttgagttcttctgctttacatgagttcggcaatattttagcaggttcctatttaacggcattggctgatttgacaaagcttgagatttacccgagcgtgccggaaatctcacttgatatgttcggcgcggttatcagtgaagggctgatggagctcagccaagtcggagagcatgccattgtcgtggatacttctatttttgaccagggcagccggcaggagctcaaagcccacatgtttatgctcccggactatgattcttttgaaaagctcttcgtctcattgggtgcggctttatgagccgtgcggaagccgcagtcgttaaagtggggattgcggatgttcaagtcgcgcgttacccggataaaatccggacctcgggactcggttcatgcgtagggctggttttatacgataaagacaaacaaacggcaggactcgttcacgtcatgctgccggactccggtttatcaaaaacggcggagctcaaccgtgcaaaatacgcggacaccgccgttaagatgacgattgatatgcttttgaaagccggctgccgcaagtttgccctgaaggcaaaactcgccgggggagcggagatgtttaagtttaaaatgacaaacgacctgatgaaaatcggtccgaggaatgtagcggccatcaaagagcagctttcattgtataacattccggtcatcagtgaagatacgggcggctcaagcggccggacgattgaatttgagccaaagtcctgcatgctgcacattcgaactgttaaacaaggtgaaacaacgatttaataaaggtatgaggtagggggataacaatgcaatccttgaattatgaagatcaggtgctttggtcgcgctggaaagagtggaaagatcctaaagccggtgatgatttaatgcgccgttacatgccgctggtcacatatcatgtcggcagaatttccgtcggactgccgaaatcggtgcataaagacgatctaatgagccttggtatgcttggtttatatgatgccctggaaaaatttgaccccggccgggatttaaaatttgatacctatgcctcgtttagaattcgcggtgcaatcatcgacgggctgcgtaaagaagattggctgcccagaacttcacgggagaagacaaaaaaagtcgaagcggcgatcgaaaaacttgaacagcgctaccttcggaatgtgactccttcagagatcgcagaagagctggggatgacggagcaggacgtagtatcaacgatgaatgaagggttttttgccaatctcttatcaattgatgaaaagcttcacgaccaggatgacggtgagaatattcaagtgatgatcagagatgacaaaaatgtgccgccggaagaaaaaatcatgaaggacgagctgatcgctcagcttgcgggcaaaattcacgagctctctgaaaaagagcagcttgtcgtcagtttattctataaagaagaactgactttgaccgagatcggacaagtcctgaacctttcgacgtcgcggatttcacagattcattcaaaggcgctgtttaaattaaagcatctgcttgaaaaagtaattcaataatgaactcatggttagcgagtgaaaaacatgtcaacactattatggcttttaagctttgtgcttcacggcgtactgctttatgccgtcattattctgtacacgaggttttcagccctcaaggagacggagcgccagcagaagaagattcttgaagagacggaaaacacccttgcagcgtttctgcttgagctgaaagaagaaaatgaaagactcgaagacgcaaaaagccgtcaagcgccggacgcagaagatgccgaaccccggccggaaccgaaagaagagcctgatattccggaccacatggaaaagctcatcagtgcaacggaacgggctgaaagtgatgaaaacaacggtgcgcattcgtttgaaaaacgtgtttcagaattatatgaacaagggctcacccccgcggaaatcgccaaacggatgcagagcggaaagacagaaatcgagctgtttttaaaatttcgcggcaaagctgtaaaggattcttgattgtcgcataaagctgtgttatattatgtcttggtgttaaatacacacgcttaacgatttatgcagagggtgctgcaaacggcagttctgcacaaaaatgacctaagcggaggaaaaaaaccattttattaggaggaaatcacatgtcagttatttctatgaaacaattgcttgaagctggtgttcacttcggccaccaaacacgccgctggaacccaaaaatgaagcgttacattttcacggagcgtaacggaatctacatcattgaccttcaaaaaacagtgaaaaaagtagaggaagcttacaacttcacgaaaaaccttgctgctgaaggcggaaaaatccttttcgtcggcacaaaaaaacaagctcaggattctgttaaagaagaagctgtacgctctggcatgtactatgtcaaccaacgctggttgggcggtacactgacaaacttcgaaacaatccaaaaacgcattaagcgtctgaaagacatcgagaaaatgcaagaaaacggtacatttgaagtacttccgaaaaaagaagttgttcaattaaaaaaagaattagagcgtcttgaaaaattcctcggcggaattaaagacatgaaggatcttcctgatgcattattcatcatcgatcctcgcaaagagcgcatcgctgttgcggaagctcgcaaattgaacattcctatcatcggaatcgtagatacaaactgtgatcctgatgaaattgatgtcgtaatccctgcaaacgatgacgcaatccgcgctgtcaaacttcttacttctaaaatggcagatgctattcttgaagcgaagcaaggcgaagaagaagcggaagttgctgaagagactgcacctgaaacagaaacgacaactgcgtaacctaatcaaaaggtgataagagggactgccttttatcaccttttttcaagaaaaatgtatctatacatatcttgtttacacatataaggaggaattcaaatggctattactgcacagcaggtaaaagaactgcgtcaaaaaacaggcgctggtatgatggactgtaaaaaagcattgactgaaactgacggagatatggacaaagcaatcgaccttctgagagaaaaaggaattgcgaaagcagctaaaaaagctgaccgtatcgctgctgaaggttctactcttattaaaactgacggcaacaaaggcgttatcttagaagtaaactctgaaactgatttcgttgcgaaaaacgaaggcttcaaagagcttctgaacacgcttgctgaccaccttcttgcaaacgctcctgctgatcttgaagaagcaatgggtcaaaagatggaaaacggttctactgttgaagaatacatcacaagcaacgttgctaaaatcggagagaaaatcactcttcgccgttttgctgttattacaaaagaagacagcgaagcgttcggtgcttaccttcacatgggaggccgcatcggcgtattatccgttcttagcggaacaactgacgaggatcttgcaaaagacatcgcgatgcatgttgcagcggtaaatcctcgttacatttcccgcgaccaagtgtctgaagaagaagcaaaccatgagcgtcagattctgactcagcaagctcttcaagaaggcaaaccggaaaacatcgtagctaaaatggttgaaggccgtctgaacaaattcttcgaagaaatttgcttattagaccaagctttcgttaaaaacccagacgaaaaagtgaaacaagttgtggctgcgaaaaacgcatctgttaaaacttacgtccgctacgaagttggagaaggtattgaaaaacgccaagaaaactttgctgaagaagttatgaaccaagtgaaaaaataatggcggaaagccttggcgaatctttcgcggcttttcaggcagtataggggacactacttgtgttccctatttttaaaactatatttacaaacctttttttctcttgcataataggaaacggcaatgtttacacttggaggttattatggaaaaaccaaaatacaatcgtatcgttttaaagcttagcggagaagcattggcaggagagcagggaaacggcattaatccgactgtcatccaatccatcgctaaacaggtaaaagaaatcgctgagcttgacgtcgaagtggccgtagtcgtaggcggcggcaacttatggcgcggaaaaacaggcagtgacttaggaatggaccgtgcgacggccgattatatgggcatgcttgctactgtcatgaactcacttgccctgcaggacagcctggaaacgctcggaattcagtccagagtgcagacatcaattgaaatgcgtcaggtcgctgagccttacatcagaagaaaagccatccgccacctggagaaaaaacgcgttgttatttttgccgcgggaacaggaaacccttatttctctacggacacaaccgcagcgctgcgtgccgctgaaatcgaagcggacgtgatcttaatggcgaaaaataatgtcgacggtgtgtataatgctgatccgagaaaagatgagtcagctgttaaatacgaaaaattatcttatctcgatgtgttaaaagacgggctggaagtcatggattctacggcttcttcactatgtatggataatgatattccgctgatcgtcttttctattatggaagaaggaaatattaagcgtgccgtaatcggcgaatcaatcggaacgatcgtaagggggaaataacgttgtcaaacgaagtattaacacaaacaaaagaacgcatggaaaaagcggttgccgcttattcacgtgaattggcgtcagtccgcgcaggacgtgccaacccatctctattggataaagtgacagtagaatactacggtgcccaaacacctttaaaccagctgtcttccatcaatgtgcctgaagcgcgtatgcttgttgtcacaccgtatgacaaaacggcaatcggcgatattgaaaaagcgattctgaaagctgatcttggcgtaacgccgacaagtgacggcacaattatccgcatcgcgatcccggctctgactgaagaaagacgtaaagaacttgtcaaagtcgtgaaaaaatacgcggaagaagcgaaagtagcagtccgtaatgtccgccgtgacagcaacgatgacctcaaaaaacttgagaaaaacggagacattacagaagacgagcttcgtgcttccagtgaagacgttcaaaagctgacagatgaatatgtgtcaaaaattgacagcgtcacaaaggacaaagaaaaagaaatcatggaagtttaatgaaaaactatgtacaatagataatgtgaaaagaccctctcatgtttacagggggtttttttgttaatactgttgattacattgatcatcagcaacgcaacctttttgggtgacggaggaatctcatgctcaacatactcaaaaattggaagaatcagcagaatgcggcttccaacttagaacggtatacaaaagaagacatactgaagggtgaaattcccgcacacattgccattattatggacggaaacggacgctgggcgaagaagcgctcactccctcggattgcaggacatcatgaaggaatgaaagtggtaaaaagggtgacaaagctcgcaagtcagctcggcgttaaagttctgactctttatgcgttttcaacggagaactggaagcgcccgaagatggaagtcgactttttgatgaagcttccggaagagttcctgaatacgtatcttcctgaattaatagaggaaaatgtacaggtgaaaattatcggagatgaatccgcgctcccttctcatacgtacagggcgattgagaaggccgtaaaagatacagaacaaaatgacgggctgattctcaatttcgctttgaactacggcggacgcacggaaatcgtcaatgcggcaaaagcactggctgaacaggtgaaaagcggcacgctgaatatcgaagacattgatgaagcgctcttttccgggcatttaatgacagaatcactccaggacccggagctgctcatcagaacgagcggagaaatcagattgagcaactttatgctttggcaggtggcttacagtgaatttgtttttacagatgtcctgtggcccgattttaaagaagatcactttctgcaggcagtgggagaatttcagcagcggggccggaggtttggcggaatttagaggatggtggaaatgaaacaaagattgttaacaggtgttctggcagcggcattatttttatttttggttattttcggaggattgccgttcaccgtatttgtttacgtgatgggaagtatagcgctttttgagcttttgcggatgaaaaagctcagatttttttcttttccgggtctgatcagcctcttgttgttatggctgtatatgatgccggacaagtatcattttttcgatgcgaaaatggaagtaacgattttcgccgtattgattctgctcagctatacggtgctcgtgaaaaacacctttacgtttgacgaagtcgggtttatcgttctcgcgacggtatatatcggactgtgttttcattattttattgaaatcagaaacattgaaacaaacgggcttttgtatatcttttatgcctgcgttgtcatatggtcaacggactcaggcgcatatttcgtcggaaagtcgctcgggaagcggaagctgtggcccgaaatcagtcccaacaaaacggtggaagggtttctcggcggtattgtcatcgcccttatttttacggctgtttttcagctgtttgcgcaccttccgatttcatacccggttcttttggtcatcacgcttgttctgtctgtgttcggacagatcggggatttggttgaatcagcgcttaagcggcactatgatgtgaaggattcgggaaaaatccttcccgggcacggcggcattttagatcgatttgacagctttttgtttgtcatgccgttcttatactttctgcttgcgcttttttcatgagaaaggctaatatgaaaataagaccgatctggacgcatagaatgggagtggcattttgaagaatatttgtcttttaggagcaacaggatcaataggggagcagacgttagacgtattgcgcatgcatcaagatcagttccgtctcgtctcgatgactttcggtaaaaacgccgagaaagcgatcccgttgatcagaacgtttcagccgaaatatgtagcagtcggcgacatggatacataccaaaaagtgaaagaagcgtctttttctcatgaatgtcaaatcggcatcggagaagaaggcctgattgaagcggcagtcatggacgaagtggatatcgtggtcaatgcgctgcttggaagcgtcggtttaatcccgactttgaaagcgattgaacagaaaaaaacaattgcgcttgcaaataaggaaactctcgtcactgccgggcatatagtgaaaggacacgcaaaacgatacggtgttcctcttcttccggttgacagcgaacattccgctatttttcaggcgctgcaaggcgaacagagcaaaaatatcgagcgcctgatcattacggcatccggcggcagtttcagagataaaacgcggcaggagcttgagtctgtaacgattgccgacgcccttaaccacccgaactggtcgatgggtgcaaaaattacgattgactcggctacaatgatgaataaaggacttgaagtcattgaggcgcattggctgtttgacattccgtatgaacagattgacgttgtattacataaggagagcatcattcattcgatggttgaatttcacgacagaagcgtcatcgcccagctcggaaatccggacatgagggtgccgattcaatatgcgctgacatatccggaccggctgcctctgcctgaaacaaaaaggcttgaattatgggagatcggaagcctccattttgcgaaagctgactttgaaaggttccgctgcttacaatttgcctttgaatcaggtaaaatagggggaacgatgccgacggttttaaatgcggccaacgaagaagccgttgccgcttttcttgccggacggatttcattcttatcgattgaggacctgattgaaaaagcattggaccgccacagcgtaattcaggatccgagtcttgcggatatccaagaagtggacaaagacacccggggatacgttaattcaatactcacataaggtggtatgttcgtgaatacagttatcgcgtttattattattttcggaacgctcgtttttttccatgagctggggcatttattgctcgcccaaagagcgggaatcctttgccgtgaatttgcgatcggcttcggccctaaaatcttttcatttaaaaagaatgaaaccgtgtatacgatcagactccttccggtcggcgggttcgtccgcatggccggtgaagacccggagatgattgaagtcaaacccggttataccgtcgggcttctttttaataaagatgacgaagtggaaaaagtcatcattaatcaaaaggaaaaatatcccgacgctttaattatcgaggtggagacggctgatcttgagcacgaaatgaagattaccgggtacgagcaggggaaagaagatgaactggcgggctttactgtcagtcagacctctttttttatcgtagacggagaagaagtgcagattgcgccttacaatcgacaattcgggtctaaacccgtatggaagcggattaaggcgattgctgccggtccgataatgaacttcatcttagcgtatgtcattctcgtcatgcttggattcattcaaggcgtgccttcgaatcagcctgagctcgggaagctgacagacaatggacgcgcagcggctgccggtttaaaagaaggcgactatatccagagcattaacggtgaaaaaatgaggtcatggacagacatcgtgacagcggtaaaagaaaatcccggaaaaaaaatcgatgtcgccgtcaaacgggacggcaaatcgtttcatatctcggttacacctgaagctgtaaaagatgaaaataaaaaaacaatcggccgcttcggctcttatgcgccgactgaaaaaggcgcgcttgcagcgattgcctatggcgcgacatctaccgttgatgtcacaaaagcgattctgaccaatctgagcaaacttgtgacaggccagtttaagcttgatatgctttcgggtcctgtcggcatttatgatatgacggatcaagttgcaaaaaccggtattatcaacctattccagtttgcggcgtttttaagcatcaacctgggaattgtcaacctgctgccgataccggcgcttgacggcgggcggctgctgtttttattcattgaagcaatccgcggcaagccgataaaccgtgacaaggaagcatttgtcgtatttatcggcgtagctttcttaatgcttcttatgctggttgtcacatggaacgatatccagcgtttattcttataattgactagtaaaaaatcagaggtgcgaagacatgagacaaagtttgacgcttattccgaccctgagagaagtgccggctgatgctgaagcaaaaagccataagcttctgctgagagcgggatttatcagacaaaatacgagcggggtttacagctatatgcccctggcttacagggtcattcaaaacattcagaagatcgtgcgtgaagaaatggaaaaaatcaacgcggtggaaatgctgatgccggcccttcagcaggctgaaacatggcaggaatcaggcaggtggtatacgtacgggcctgaattaatgcgtctgaaagaccgccacggccgtgaatttgctttaggcgcgacacatgaagaagtcattacttctctcgtgcgcgatgaggtgaaatcttataagcgtctgccgctcactctttaccagatccagtctaaattcagagatgaaaaacgcccgcgtttcgggttattgcgcggacgcgaattcatcatgaaagatgcgtattctttccatgcttctgaagaaagtctggaggaaacataccaaaacatgtacggcgcatacagcagcattttcgcacgctgtgaattaaacgtccgtcccgttattgccgactcgggcgcgatgggcggaaaagacacgcatgaatttatggctctttctgaaataggggaagataccatcgcttattccgatggatcctcttacgcagccaatacggaaatggcggaagttgtcatgaacagcgagccgtcagatgaaacacccgaggcattggagaaaattgatacgccgaatgtcaaaagcattgaagagctcgcttcgttcttgcagatcgagccgagcgcctgcatcaaatccatgctgtttaaagctgatgaccgatttgttctcgtgttagtaagaggcgatcatgaggtcaatgacgtgaaagtgaaaaaccttctgaacgcggaagtggttgagcttgcgtctcatgaagaagtagcagagaaacttggcatggagccgggatttgcggggccgatcggcgcttccggcgacattgagatttatgccgaccaagccgtgaaagtaatggtaaacgccgttagcggcgcgaatgaaaaagaccgtcattaccgaaacgtaaacatcgaacgtgacgcgtcagtaaaagcatatgccgatcttcgaatcattcaggaaggcgatccgtcacctgacggaaaaggcacgatccgtttcgctgaagggattgaggtcggacaagtctttaaactcggcacgcgttactctgaagcgatgaatgcgacataccttgatgaaaacgggcgtgcgcagccgatgctgatgggatgttacggaatcggcgtgtccagaacgctttcagccatcgctgaacagcatcacgacgaaaaaggcttgatctggccgaaaagcgttgctccgtatgatcttcatattttggcactgaatatgaaaaacgaagcgcaaaaagagcttgctgaacagctttacggcaaattccaggcagaaggttatgaggtattatacgatgaccgtgctgaacgcgcaggcgtgaagtttgctgattctgatctgatcggccttccgatccgcatcactgtcggaaaacgtgccgacgaaggcatcgtagaagtgaaaatccgcaaaaccggtgaatctgccgaagtttcagtggatgagctttctgaatttattaagacgaagtaatcaccataacgaatcatacaaaatcatgttaaaatagagaaaaaagaaggtacctcatcacctgcggaggtaccttcacttatgatgttttaagggagggatactgtctgaatggaacagttatcagtaaacagaagacagtttcagattcttctgcagcagcttaatatgacagatgataccttcatgacatactttgaagacggagagattgataaactgacaatccataaagcagaaaaggcctggcatttccaatttcgctttaaggctcttttgccgtatcaaatatatgattcattcatgatgaggttaacacaatcgtttgctcacatcgcccgtgtcacatcgtctgttcaggtcatcgaccctacagtgacagaggagcttgtacaggattattggacacgctgtattgaagagcttgaaggaacctcgccgccgatggtggctcttttgaatcagcagaagccgaagctcaagggaaacaaactgatcgtgaaaacaaaaacagatacagaagcatctgcgctcaaaaataaatacttcgcgctgattcagcacagctaccgccaattcggctttccggaactgcagctggataccgaaattttcgtatctgaccaagaagtccagaaattccgcgagcaaaagcttgctgaagatcaggagcgggcgatgcaggcgcttatcgagatggagaagaaggaaaaagagggcgatgaggatcaggcaccgtccggaccgcttgtcatcggctatcaaattaaagagaacgaagaaatccggacgcttgacagcatcatggatgaagaaagaagaattacggtgcaggggtttgtgtttgatgctgaaacacgcgagctgaaaagcggacgcacgctctgcattttcaaaatcacggactatacaaacagcattttagtaaaaatgttcgccagagaaaaagaagacgccgctttgatgaaaacgctgaaaaaaggcatgtgggtgaaggcgcggggaagcattcaaaacgatacattcgtcagagacctcgtcatgattgcaaatgacgtgaatgaaataaaagccaaaacccgtgaagacaccgctcctgaaggcgaaaaacgggttgagcttcatctgcattctccgatgagccaaatggatgctgtaacgggcgtcggaaaacttgtcgaacaggcgaaaaaatggggacatgaagcgattgcgttaactgatcatgccgttgtgcagtctttcccggatgcctattccgccgcgaaaaaacacggcattaaaatgatttacggattggaagccaatatcgtagatgacggcgttccgatcgcatacaatccagctcaccgtctcctggaagaagacacatacgtcgtctttgacgttgaaacgacaggtctgtccgcagtgtatgacaccatcattgagcttgccgcagtcaaaataagaggcggagaaattatcgataaattcgaagcgttcgccaatccgcaccatccgctgtcagcaacgacgatagagcttaccgggattacggacgacatggtccgcgacgctcccgatgtcgttgacgtcgtccgggattttaaagaatggatcggcgatgacgtgcttgtggctcataacgccagctttgatatgggatttttaaatgtggcgtacaagcgtcttttgaaaacggaaaaagcgaaaaatccggtcattgatacgctggaactcgcgcgtttcctgtatcctgagtttaaaaatcaccgattaaatacgttatgtaagaagtttgatatcgaattaacccagcatcaccgagcggtttttgacgctgaagcaacgggctacctgctgttgaaaatgctcaaagatgccgctgaaaaagacattttttatcatgatcagctgaatgagaatatgggacaatccaatgcttatcagagatcaagaccttatcacgctacattgcttgccgtaaatgagaccggccttaaaaatctgtttaagctcgtgtccatttctcatattcaatatttctacagagtgccgcgcattccgaggtcgcagcttaataaatacagagaaggtctgttaatcggctctgcctgtgacaggggtgaggtctttgaaggcatgatgcaaaaatctcctgaagaggttgaagatatcgcatccttctatgattatcttgaagtgcagccgccggaagtatacagacaccttctgcagcttgagctcgtccgggatgaaaaagcgctgaaagaaatcatcgccaacatcacgaagctcggagaaaaattgaataagccggtcgtggctacgggaaatgtccactatttaaacgatgaggataaaatttaccggaagatcttaatatcttcccaaggcggcgcaaacccgttaaacagacacgaactgcctaaagtgcacttcagaacgacagatgaaatgctggaggctttctccttcctcggtgcggaaaaagcgaaagaaatcgtggttgacaatacgcagaaagtcgcttcgatgatcgatgagatcaaaccgatcaaagacgatctgtacacgccgaaaattgacggggctgatgaagaaatccgtgaaatgagctatcagcgcgccagaagcatttacggtgaagagcttcccgaaattgtggaagcgagaatagaaaaagaattaaaaagtatcatcggtcatgggttcgccgttatttatctcatctctcataagcttgtaaaacggtctctggatgacggttatctcgtcggctcccgggggtccgtcggttcatcgcttgtggcgaccttaacggaaatcactgaagtgaacccgctcgctccgcactacgtgtgcccgagctgccgatattccgaattctttaatgacggatcagtcggttccggttttgacctgccggataaaagctgcccgtcttgcggcacacctttgaaaaaggacgggcatgatatcccgtttgaaacgttcttaggctttaaaggtgacaaagtaccggatatcgacttgaacttctcaggtgagtaccagccgcatgcccataactacacgaaagtattgttcggtgaagataacgtgtatcgcgcgggaacgatcggcaccgtcgcggaaaagacggcttacggatatgtgaaaggctatgcgggcgatcacaacctgcacatgcgcggcgcggagatcgaccgtctggtgcaaggctgcaccggcgttaagagaacgaccggccagcacccgggggggattatcgttgtcccggattacatggatatttacgatttttcaccgatacaattcccggcagatgcgacggggtctgaatggaaaacgactcattttgacttccactccattcatgacaacctgctgaagcttgatatattagggcacgatgatccgaccgtcatccggatgcttcaggatttaagcggaattgatccgaagacgattccgacagatgatccggaagttatgaagattttccaaggcacagaatcgctaggcgtcactgaagagcagatcggctgtaaaacggggacgctcggcattcctgaattcgggacgcgatttgtgcggcagatgcttgaggatacgaagccgactacgttctccgagcttgtccagatttccgggctttctcacggaacggacgtatggctcggcaatgcgcaggaactgatacacaacaatacgtgtgaactgagcgaagtgatcggctgccgtgatgacattatggtttacttgatctatcagggccttgagccttcactggcctttaaaatcatggaattcgtccgtaaaggcaaaggcctgacgccggaatgggaagaagaaatgaaaaagaacaatgtgccgaactggtatattgattcatgtaaaaaaatcaaatacatgttcccgaaagctcacgccgccgcatacgtgctgatggcggtgcggattgcctattttaaagtacatcacgcgcttttatattatgctgcgtattttaccgtccgcgcagatgactttgacattgatacaatgattaaaggctcgaccgccatcagagcggtgatggatgatatcagctctaaagggcttgatgcttcgccgaaggagaaaaacctccttaccgtgttagagcttgcgcttgaaatgtgtgagcgcggctattccttccagaaggtcgatctataccgttcgagcgcttcggaatttatcattgacggcaacagtctcatcccgccgttcaactcaattccgggactcggaaccaacgccgctctcaatattgtgaaagcgcggaaagaaggggagttcctttcaaaagaggatcttcaaaaacgcggaaaagtgtcaaaaaccattttagagtatttagaccgtcacggctgtcttgagtcgcttccggaccaaaatcagctgtctctgttttaagctttgtgcacagcctccgagcggagtttgatttgcattaaatatatggttatggtatagttttattggaaatgctaacgattaccgaggcaaagagtggggaaacccgctcttttgtattgaacaggcaattttgcctcgacatgtccatcgttttctcaatgcccctgctcttttgaagcagggtttttatgcagaggaacggctgatatgatatcgacagcacaaggaggaaaaacatgagcaaaaaagtgactgataccgttcaagaaatggctcagcccatactggatgaccttcagcttgaactcgtagacattgaatttgtcaaagagggtcaaaactggttccttcgcgtgtttattgattccgagaacggtgttgatattgaggagtgcgccaaagtcagcgaagcgttaagcgaaaagctggatgaggccgatccgatcacccagaactactttcttgaagtatcttctcctggagccgagcgtccattaaagaaaaaagccgacttcgaaaaatcactgggcaaaaatgtgtacatgaaaacgtacgaaccgattgacggtttaaaagtgtttgaaggcaaattggctgaattcgatggacaaactgttacaatagagatgacggtcaaaacaagaaagaaacgggtcaatattccgtatgaaaaaatagctaacgcaagattagctgtaacattttaatgaatgaagtattagtgtttaaggggggagaccgctaacatgagcagtgaactattagatgctctcactattcttgaaaaagaaaaaggcatcagtaaagacattatcatcgaagcaattgaagctgccttaatttccgcgtataagcgaaattttaaccaggcgcaaaacgtacgggtcgatctgaaccgtgagacgggcacgatccgcgtgttcgcaagaaaggatgtcgtagacgaggtatacgattcaagacttgaaatctcgcttgacgacgcccagcacatccatccgaactaccttgtcggagatgtcgttgaaatagaagtaacgccgaaagacttcggccgcattgctgcgcagacggcgaaacaagtggtgacgcagcgtgtccgtgaagctgagcgcggcgtgatttactcagaatttatcgatcgtgaagaagacatcatgacgggaattgtacagcgcttagacagcaagtttatttacgtgtctctcggtaagattgaagcgctgctgcccgtcaatgaacaaatgccgaatgagagctataaaccgcacgatcggattaaagtatttatcacaaaagtcgaaaaaacgacaaaagggcctcagatctatgtatcaagaacgcatcctggtctgttgaagcgtctttttgaaatcgaagtgccggaaatttatgacggaacggtcgaactgaaatccgttgccagagaagcgggcgaccgctctaaaatctccgtccgcactgatgatcctgacgttgatccggtcggttcatgcgtcggtcctaaaggccagcgcgtgcaggcgatcgtcaatgaactgaaaggcgaaaaaattgatatcgtcaactggtctgacgatccggttgaatttgttgccaatgcgctcagcccgtctaaagtgctggatgtcatcgtcagcgaagaagaaaaagccacgactgtcatcgttcctgattaccagctttctctggcaatcggaaaaagagggcaaaacgcccgcttagctgcgaaactgacaggctggaaaatcgatatcaaaagtgaaacggatgcaagagaccttggcatctatccgagagggcatgaagaagatgacgatttagagccgctctttatggagcctgaaacagccgaatcggatgaataagaggtgactttaggtgaataagcgaaaaaaaattcctctgcgcaaatgcgtggtaacgggggaaatgaagcctaaaaaggaactgatccgaattgtccgttctaaagaaggagagatttcagtcgatccgaccggaaagaagaacgggcggggtgcctatatcacccttgagaaagaatgcatcttagctgcgaaaaagaaaaacacattgcaaaatcaatttcaatcacaaatcgatgaccagattttcgaagaattgctggaactggcggaaaaggtgaaaaaataacatgtctggaatggaatggtttcccttgctgggtctggccaatcgagctcgtaaggtcgtgtcgggcgaggacttggttataaaagaaattagaaatgcgcgtgcaaaacttgttctgctgacagaagatgcatctgcgaatactgcaaaaaaagtatccgataaatgcaattattataaagtgccttataaaaaagtcgaaagccgcgctgatctcggccgctctatcggcaaggaatcacgtgtcgttgtcgccgtcactgaccaaggttttgcgaataagctgatcagcttgctcgattaatatttttgggggtgaacgaatggctaaaatgagagtttacgaatatgcaaaagccatcaatgtttcaagcaaggaaattttgactgcgctgaaaaacatggatatagtagtaaataaccatatggcaatgcttgaagaaaagaccattaagcagcttgatgcgaaatttaaaaaaggcggcgccggcgttacatctcagaagcctgcggaaacgaacaaaaacaagccgcaagggattaatcagcagcctgctgggaatcaaccaaacaaaattcgagacggaaagaagaatgacgtgcagaataatcaatttaacaaaaacaagaagaataacaacaacaacaaaaacaaaaacaaacgcaatcataacaacaaaaatcagtatcagcaaaaaccgctgaagccgaaaaaagagcttcctgagaaaattgcgttttccggctctttaacagtcggagctttagccgaggaactgggcaaagagccgtctgaactcattaaaaaactgatgcttctgggcgtaatggctaccattaaccaggagcttgacaaagacacaatcgaactgatcgcatctgaatacggtgtagaaacagaagaagtgattgtgcttgaagaaactgagcttgaaaaatatgaagaggctgacaaagaagaagatcttcaaatccgtccgcctgtcgtgacgatcatgggccacgttgaccacgggaaaacgaccctccttgacagcatcagaaaaacaaaagttgttgaaggtgaagccggcggaatcacccagcatatcggggcttaccagatcgaagaaaacggcaaaaaaatcacgttcttagatactccgggacacgcggcgttcacaacaatgcgtgcgcgcggtgcggaagtaactgatattaccattttagtcgtagcggctgatgacggcgttatgccgcagacagtcgaagccatcaaccatgcgaaagcggctgaggttccgattatcgttgccgtgaataaagtggataaagaaagcgcgaaccctgaccgtgtcatgcaggagctgactgaatacggactcgttcctgaagcatggggaggagaaacgattttcgttcctctgtccgctcttacaggcaagggaattgacgagcttgtcgaaatgattctgcttgtcagtgaagtggaagagctgaaagccaatccgaaccgtcaggcaaaaggaacggttattgaagctgagctcgataaaggaagagggtctgtcgcgacacttctcgttcaaacgggaacattgaatgtcggagatccgatcgttgtcggaaatacattcggccgcgtgcgggccatggtcaatgatctcggccgccgcgtgaaaacagccggaccgtccacacctgtagaaatcacgggcttaaacgacgtaccgcaggctggcgatcaattcctcgtctttaaagacgaaaaaacagcccgttctgtcggtgaagcacgcgcttccaagcaactggaagaacagcgcagcgacaaagcgaagctgagcctcgatgatctgtttgaacaaattaaacaaggcgatgtcaaagacatcaatttaatcgtaaaagctgacgttcaaggttcagccgaagcgttaacagccgctcttcaaaaaattgaagtagaaggcgtaaaagtgaaaatcattcacacaggcgtcggtgcgattacggaatcagacatcattctcgcatctgcttcaaatgcaatcgttatcgggtttaatgtgcgcccagacggaaatgctaagagcacggctgaagctgaaaatgtagatatccgtcttcaccgtatcatttacaaagtcatcgaagaaattgaagcggcgatgaaaggaatgcttgatcctgaatacgaagaaaaagtcatcggccaggttgaagtgcgccaaacattcaaagtgtcgaaaatcggtacgattgccggcggatatgtaacagacggccacattacacgtgacagcggactccgcctgatccgtgacggcgtggtcatcttcgaaggggaagtagacgttctgaaacgcttcaaagatgatgtgaaagaagtttcacaaggatatgaatgtggtattacaattaagaaatacaatgacattcgcgaaggcgacatccttgaagcgtatgtcatgcaggaaatcgaaagaaagtgatcggatttgcggaatgtgaatgcatcatttatgatgcgggatcattaaaggagaaacgagccgttctgaagcggattataacgagggttcagaataagttcaacgtgtcggccgcagaaatcggctatcaggacacttggcagcggaccagcttcggaatcgccgtcgtctcctcctctcacgttcaggcggaaaaggagatccagcgcgtactcgcgtttattgactcctttcccgaaatagaacggacgatcactagaacagagtggttttaacttagaggtgattgaattgagtatgagagcaaaccgtgtcggcgagcagatgaaaaaagagctcggggatattatcagccgaaagctgaaagacccgagaatcggatttctcactgtaacagacgtacgtgtttcaggtgatttacaaatagcgaaggtgtatatctccgttctcggcggagagaaaaagaaagaggaggcgctgaaagggcttgagaaagcgaaaggatttatccgttccgaaatcggcagccgaatcagactccgcaaaacgcctgagcttgaatttgaatttgatgaatcaattgagtacggcaaccgtattgaaacattgattcacgaactgcattcagataaaccgtctgaataacaaggaaagaggatgggcgagtgtcgtctgtcctcttttctgcgttttacgggatacaattgataacaaaggagcgaaagacatatggttaacggagttctccttttacataaaccggtcggcatgacttctcacgactgtgtaacgaaaataagaaaactgttaaaaacaaagaaagtcggacatacgggaacgcttgatccggaagtgtcaggcgtactgccgatctgtgtcggacgggccacaaagattgttgagtacgtcaccgacaagtcaaaaacgtacgatgctgagatcactctcggcttctccacatcgaccgaagaccagacgggagaaacggtcagcgtaaaacctgtcaaggagccgctgaaagaagcggatatcaaagccgttttagacgaattgaagggaccgcaggagcaagtgccgccgatgtattccgctgtaaaggtcaacgggaaaaagctctatgaatacgccagagccggtattgaagtggagcggccgaagcggaatatcacgattgaagatatcgcgctcacttcccctgtcacttataaagaagacacagcatcattccgctttacagtcacgtgctcaaagggcacttacgtgagaacattggcggtgacaatcggtgaaaaactcggctatcccgcgcatatgtcgcatctcatccgcaccgcttccggcgatttcagccttgatgagtgtttcacgtttgaggaacttgaacagcaggtttcagacggaacggttgcagagcatgccgtgccgattgaaagagcgctcaatcatttgccgaaatgggtcataagtgatacattagctaagaaagctgaaaacgggtcagtgtttgacatcccggcggaattttctgcaatgacagctgacgcccgtatagcggtctgtactgaagacggagaatgtgtggccatttatatgccgcatccttcaaaaaaaggactgctgaaaccggctaaagtgctcatgcaaaaaagcgaacaataagaaaaaaggtgaccgttctgtgaagacgatacatatttctcatccgcatcatttacaaaaagaagagcagccggcgtctgtcatggcgctcggctactttgacggcgttcatttgggacaccggaaagtaatcggaacagccagacaaatagccgaagaaaaaggcctgtcgctggccgttatgacgtttcatccccacccttcccatgtgttgggcagggacaaagagccaaaggatctgattacgccgcttgaagataaaatcagccagatcgggcgtttaggcgctgatgtgctgtatgtcgtaaagtttgatgaagcgtttgcgtctctttctccaaaacagtttgccgaggagtatattttagggttaaacgcgcgtcacgctgtgggaggcttcgattttacgtacggaaaatacggaaaaggcacgatggagacgctgccggacgatttaaacggcaaggccggatgcacgactgtcgagaaacagaccgagcaggacagaaagatcagctccacttatatccggtcagcgctgcaggatggtgacgttgaacttgcgcacactcttctcggccagccgtattttatccggggcactgtgattcacggagacaaaagaggccgcaccatcggttttccgaccgcgaatgtcggcctgcacaacagttatatcgtgccgccgacaggcgtgtatgcagtgaaagccgaaataaaaggcgaggtgtatgaaggcgtctgcaacatcggctacaaaccgaccttttatgaaaagcgtcccgatcagccgtcaattgaagtacatttgtttaattttcagcaggatgtatacggagaagacgttaaaatcgagtggtacaaacgaatccgaagcgaacggaagtttaacggcatcgatgaactgacggctcagatcgggaaagacaaacaagaagcgatccgttttttcagcaaataacggaaaaaacatcaaaagtacacaaattttcttctaaaagatttgcatatgggcgcgatttttagtatcatatgtttcgtagtcttaaaaccattgcttggcaatccgaagtcaccgacggttgctaggtaactggggctaattatgatatggaggtgaaacaggatggcaattactcaagagcgtaaaaatcaactcatcagtgagttcaaaacacacgaatctgatactggatctccagaagttcagatcgctatcctaacagactcaattaacaacttgaacgagcatttgcgtactcacaagaaagatcaccactcacgtcgcggtcttcttaaaatggtaggtaaacgtcgtaatcttcttacgtatctgcgtaataaagacgtaactcgttaccgtgagttaattaacaaactaggcttacgtcgataatcgtaaaaagcgggaggattcccgcttttttatcgtattaaagcgaaaaaaataataataaaaaaacaatgaaatccttttacatactactttgacattgatatgttcaattcatttcgttcataataggagtaattgattatttcacacattaagagaggagctcgtaatcgaatgggacaagagaaacatgtctttaccatagattgggccggcagacagcttacagtagaagccggccagcttgccaaacaggcaaacggcgctgtcatggtccgctacggcgatactgcagtgctcagcacagcaaccgcatcaaaagaaccgaaaccgctagattttttcccgcttaccgttaactatgaagaaagattatacgcagtaggtaaaattccgggcggttttattaaaagagaaggccgtccaagtgaaaaggccgttttagccagccgtctgatcgaccgtccgatccgcccgcttttcgcagacggattccgtaacgaagtacaggtcatcagcattgtcatgagtgttgatcaggactgctcatctgaaatggctgcaatgttcggttcatcactcgctctttgcgtttccgatatcccgtttgaaggcccgatcgcgggtgtgacggtaggccgcattgacgggaaattcgtcatcaatccgacggttgaccagcttgaaaaaagtgatatcaacctcatcgttgcaggcacaaaagacgccatcaacatggtggaagccggagcggatgaagttcctgaagaaatcatgcttgaggcgattatgttcggtcacgaagaaattaagcgcctgatcgcattccaagaagaaatcgtcgcagcagtcggcaaagaaaaaacagaaatcgaactgtatgaaattgacgaagagctcagcgaaaaagtaaaaagccttgcggagccggatcttctcagcgccattcaggttcacgaaaaacatgctcgcgaagacgcgattaatgaagtgaaaaatgcagttgtcgcgaaattcgaagaagaagagcatgatgaagatacgattaaaaaagtgaaacagacactgtctaaacttgtgaaaaacgaagtgcgccgtttgatcacagaagaaaaagtccgtccggacggccgcggcgttgatcagatccgcccgctttcttcagaagtcggccttctgccgagaacgcacggctccgggctgtttacgcgaggacagacgcaggcgctcagcgtatgtacattaggcgcccttggggacgttcagattcttgacggtttaggcgtggaagaatcaaaacgctttatgcatcattataacttcccgcagttcagcgtaggggagacaggcccgatgcgcggaccgggacgccgtgagatcggtcacggtgctcttggagagcgtgcgcttgagccggtcattccgaatgaaaaagacttcccgtatacggtccgcctcgtatccgaagtgcttgaatcaaacggttccacttcacaggccagcatttgcgcgagcacgcttgccatgatggacgcaggtgttccgattaaagcccctgttgcgggtatcgcgatgggacttgtgaaatcaggcgagtactatacggtattaacggatattcaagggatggaagacgccctcggtgacatggactttaaagtagccggcacggaaaaaggcgtgacagcgctgcaaatggacattaaaattgaaggcctttcaagagaaattcttgaagaagcgcttcagcaggcgaaaaaaggaagaatggaaatcttgaacagcatgctcagcacgcttggtgaatcaagaaaagaactttctcaatatgcgccgaaaattttaacgatgaacattaatccggataaaatccgtgacgttatcggaccgagcggtaaacaaatcaacaaaatcattgaagataccggtgttaaaattgacattgaacaagacggcaccatctttatttcttctactgatgaaagcagcaaccaaaaagcgaaaaaaatcatcgaagatcttgtcagagaagtcgaagtcggccagctttacctcggtaaagtcaaacggattgagaaattcggcgctttcgttgaaatcttcagcggaaaagacggtctcgttcacatctctgaactagcgctcgaacgggtcggcaaggttgaggatgttgtgaaaatcggtgacgaaatccttgtgaaggtaactgaaattgacaaacagggacgagtgaatctgtcgcgtaaagcagtgctgcgcgaagagaaagaaaaagaacaggaacaacaacaatcttaaatgaaaacctaacaaggagcctgggagacccggcttctttattttgagaaagacaacagacgggttctaccttgtcctcctcatacataatgtgtggtgaggggggaaggacatgttgaaaaaattcgtgccgtttgccgtttttttatttcttttttttgtttcgtttgaaatgttaaaaaatccgtatacagttgattacatagacgcaatgaaaaaagacgctgtaactgtgtcagcatcaaaagatccgctctatgaagaattactgcaaaaagcgtcagagtatgaagtgaagccgcaagacgcgcggattgataaaatatggaagagtataccgggatataacggtttaaaagtcaatgtggaaaaatcctataaacaaatgaaaaaggacggagaatttcacgaagacggccttgtctatgagcaggtaaaaccgaaagtccatcttgattctctcgcgcccgaacccatttataaaggaaatcccgacaaaccgatggtcgctttcctgataaatgtcgcctggggaaatgaatacgtggagcaaatgctgcctattctgaagcagcaccaggtcaaagcaactttctttcttgaagggaaatggctgaaaaacaatcaggaactggggaaaaaaatagcggcagacggacatgaaatcggaaatcattcatacaatcaccctgatatgagcaaactgacttcaggaagcatttccgaacagcttgacaaaaccaatgcacaaatcagcgagacgctcggcatgaagccgaaatggtttgcgccgccaagcggcagcttcagaaaagccgtggtcgaccttgcggcggaaaaaggaatgggcaccatcatgtggaccgttgacaccattgactggcaaaaaccgtctcccgctgttttacaaacaagggtgttgagcaaaatacataacggagccatgattttaatgcatccgactgatccgactgcgaaaagcctggatacactgattgcaaaaatcaaagaaaaaggctacgcgctcggctcagtgtctgacttaatggatgaaaacaggctgatgaagtagcaggcggcagttgcctgtctttgaataggaggaacagacttgataaaacgctatacatgccaaaacggtgtaagagttgtgcttgaaaataatccaacggtgcggtctgtggcaatcggcgtctggatcgggacggggtcacgtcatgaaacgccggatacaaacggtatttcgcactttcttgagcatatgttttttaaaggaacaaataccaggtccgcacgtgaaatcgcagaatccttcgatcggataggcggccaagtgaatgccttcacttcaaaagaatatacgtgctattacgccaaagtgctggatgagcatgcaaactacgcacttgatgtgctggctgatatgttctttcattctgcttttgacgaaggtgagctcaaaaaagaaaagaacgtcgtatatgaagaaattaaaatgtatgaagacgcgccggatgacattgtccacgatctgctgagcaaagcgacatacggcaatcattcgctcggctacccgattctcgggacggaggaaacgctttcgtcatttaacggtgattctctcagacagcatatggatgacttttacacgccggaccgcgtcgtcatttctgtcgccggaaatgtaacggaacaattcattaaagacgtggagaaatggttcggtacatacgaagcgaagggcaaagcaagcggcatcagcgagcctgagtttcattatgaaaagctgaccagaaaaaaagacaccgaacaggcgcatctctgtctcggtttcaaaggcctgaaagtcggagacccggacatttacgatttgatcgtcttaaacaacgtgctgggcggaagcatgagcagccgtcttttccaggatgtgcgcgaagataaaggactggcctattctgtatacagctatcacagttcctatgaagacagcggtatgctgacgatttacggaggcaccggcgcgaatcagctcggccttctgtctgaaaccattcaggaaacgttatcggttctaaaacgtgacggtatcaccccgaaagagctggaaaacagcaaagagcaaatgaaggggagcttaatgctcagcttagagagcacaaacagcaaaatgagccggaacgggaaaaacgaactcctgctcggaaagcataagaccatggatgaaattatcactgaattaaatgcggtcagcctggaaagcgtcaacggcctcagccgccgcttatttacggatgattacgcactatcgctcatcagcccgaccggcaatatgccggcctcgtcttaatcggaaaagcagtctgcctctatacggggcaggcatttttttttgctccgggtcatatagtacaagggggtggctatcatgaggctcagtgaactgtcaggtaaagaaattgtggacattaaacgggcagagcggctcggcgtgctcggccagaccgatttggaaattaatgaacaggacggacaaattaccgcgctgttgataccgacggtaaaatggttcggattgcgaaaacaaggccacgacatccgcgtcccctggaaccatatccaaaaaatcgggtcagacatgatcattttagacgttccgggggagatcacgcctcccgaagagtagatcttattcattttttgcaagcaccggctcatacagccggtgcttttttcatgaaaaagacgctgtacattcaccgccctttctctttgcacatacgatgaagaggaggatgacacttaaaagatccagtaactgtaaagaaggtgaacgtttcagatgttaaccggattgacaattgcgatcattggcggtgacgcaagacagcttgagattataagaaagctgacagaacagcatgccgatatttatcttgcagggtttgaccaattggatgacggttttacaggaaccgtcaaatgcaaaattgatgagattccctttcaaaaaatagacagtatcatcctgcccgtatcggcaacgaccggagaaggcgttgtttccacggttttttcaaatgaagaagtggtattaaagcagagctatcttgagcggacaccggagcattgcgtcatttattcaggcatctccaacgcgtatcttgaggggatcgccagcgaagccggccgcaaacttgtgaaattatttgaacgggacgatatcgcgatattcaactcgattcccactgttgaaggaacaatcatgatggcgattcagcatacggattataccattcacggatcaaatgtcgccgttctcggcatggggcgcaccggtatgacgatcgcccggacgtttgcggcgttaggggcgaaggtaaaagtgggcgcgcggagttcggctcatttggcccgtataacggaaatggggctttctccttttcaacttgaagagcttactgaacatgtaaatgatattgatatctgcattaacaccgtaccgagcttgattctgaatcaaagcgttttatcgcgcatgacgccgaagaccttgattttggatttagcatcccgtccgggcggaacggatttcaaatatgctgaaaaacaaggcattaaagcgctgcttgctccgggtcttccgggaattgtggccccgaaaacagccggacagattattgcgaacgtattgagcaagcttttggcagacttaaagaaagaggggaaataaccatgtctctgaaagggaaaagaatcggattcggattaaccggctcgcattgcacatatgaagaagtttttccgcaaatagaggcgcttatcagtcaaggagctgaagtccggccggtcgtgacatcaaccgttcaatcgaccgatacccgctttggggaggggggagattgggtcagaaaaattgaagaagcaacaggctttgaggcgattgattccatcgtaaaagcggagcctctcgggccgaaacttccgctcgactgcatggtcatcgcccctttaaccggaaattcaatgagcaaactcgcaaatgcgatgactgacagccccgtccttatggctgcgaaagccacgatccgcaacggccgcccggtcgtgctcggaatttcgacaaacgacggactcggtttaaacggaacgaatttaatgaggctgatgtccgcaaaaaacatatatttcatcccgttcggccaggacgaccacgtgaaaaaaccgacatcgctcgtcgccagaatggatctccttccgattacggtagaaaaagctcttttgcaccagcaggttcagccggtgctcgtacaccatcatgaataaaaaatcatgatgacagaaaatcattccggaataaaaaaattcgatcaatccgtgactattctatggtaaaataaaacgtaaaatgcaaagtcaattcaacaaatgatgcttaattggcggaaggagttttacagatgggaagaggattacacgtagcagttgtcggagcgacgggagccgtaggacagcaaatgctgaaaacattggaagacagaaactttgaaatcgaaacactcatactactatcctcaaagcgttctgctggtacgaaagtaacgtttaaaggcgaagaatatacagtgcaggaagctgttcctgaaagcttcgaaggcgttcatatcgcgttattcagcgccggcggaagcgtatcacaaagcttggcgcctgaggctgtaaaacggggagccatcgtgattgacaataccagcgcattccgtatggacgaaaatacaccgctcgtggtgcctgaggtgaacgaaggtgatctgcacaaacataacggcattatcgccaaccctaactgttcaacgattcagatggtggctgcgcttgaaccgatccgtaaagcgtacggtttgaaaaaagtcattgtatctacttaccaagctgtgtccggggccggcaatgaagcggcgaaggaattgtacagccagacaaaggcgattttaaacaatgaacccgcagaaccgtccattatgccggttaaaggcgacaaaaagcattatcaaatcgcatttaacgccattccgcaaattgataaattccaagataacggctatacgtttgaggaaatgaaaatgattaatgaaacgaaaaaaatcatgcatatgccgaatctggaagtggctgcgacatgtgtcagactgccgattgaaacagggcactcagaatctgtttacattgagcttgaccgtgatgacgcaaccgttgaagatatgaaacagcttttaaaagaagctccgggtgttacgcttcaggatgatccggcggagcagctttacccgatgcctgctgattgcgtcggcaaacgcgatgtatttgtaggaagaatccgtaaagatttggacagagcaaacggttttcatttgtgggttgtttctgataacctgttaaaaggcgctgcttggaactcagtccaaatcgcggaaagcctgcaaaaactgaacctcgtataaaacaaacgtattttctataggcgaacagaagagagtaaggctctgcctgctctcttctgttacgtcagactaatttggagtgaaaatagtgaagatcattgttcaaaaattcggcggaacatccgtaaaagatgacaaaggccgcaagcttgcgctagcacacattaaagatgccatcagtgaaggttataaagttgtcgttgtcgtatcggcgatgggaagaaaaggagacccgtacgcgacagattctttaatcgggctcctttacggcagccagtccgacatttctccgagagagcaggatatgcttctgtcttgcggagaaacgatttcgtccgttgttttttccagcatgctgaaggaaaacggcataaaagccgcagctttaacaggagcccaggccggctttttaaccaatgcccagcatactgacgccaaaattatagaaatgaaaacagagcggcttttcgctgcacttgccagccatgacgctgtcgttgtcgcgggatttcagggagcgactgaaaaaggcgacacgacgacgatcggcagaggaggaagcgatacttcagcagcggcgctcggcgcggcggtagatgctgagtttatcgacatttttacggacgtggaaggcgttatgacagccgatccgagaatcgtggaaaatgctaagccgcttccgaacgtcacatatacggaaatctgcaaccttgcctatcaaggcgcgaaagtcattcatccgcgcgcggtggaaatcgccatgcaggcaaaggtgccgatccgcgtgcgctccacttattcaaaagacaaaggcactttggtgacgtcccatcattcgtctaacatcggcagcgatgtattcgaacggctgatcacggggatcgcccatgtgaaagatgtgacgcaatttaaggttcccgccaaaatggggcaatacaacgttcagactgaagtctttaaagcaatggcaaatgccggaatcagcgtagatttctttaacattacgccgagtgaaatcgtatataccgtagccggcagtaaaacggaagccgcgcgcagcattttggctgaattaggatatgagccgacagtgacggagagctgtgcgaaagtgtcagcggtcggcgccgggataatgggtgttccgggtgtcacgtcaaaaatcgtctccgcactttctgataaaggcattccgattctgcaatctgccgacagccatacgacgatctgggtgctcgttcatgaaaaagatatggtaacggccgtaaatgcgctgcatgaagtgtttgaactttcaaagtaaatgtgattgaatcatgatgaggtgaaaaaaatgaatgtcggaaatatatctacagcgatgattaccccctttgacagtaaagggaatgtagactttcaaaaactgtctacattaatcgactatttgttgaaaaacggcacggattctttagtcgtcgcaggcacgaccggcgaatccccgacactttcaacggaagaaaaaattgcactctttgaatttacagtcaaagaagtgaacggacgcgtgcctgttattgcgggtacggggagcaacaatacgaaagactccattaaactgacaaaaaaagctgaagaagccggcgtcgattgcgttatgcttgtcacgccgtattataataagccttcccaagagggtatgtaccgtcattttaaagccatagctgaagaaacgtctcttcctgtgatgctttacaacgtgccgggcagaacggtcgcttcgcttgcgccggaaacggccatcagacttgcggagattccgaatatctctgcgattaaagaagcgagcggcgatcttgatgccattacgaaaatcattgccgaaacaccggaagatttttacgtctattcaggtgatgacgggttaacgcttcctattctcgcagtcggcggaagaggagtcgtgtcagtggccagccatatcgtaggttctgacatgcagcagatgattaaaaactatacgaacgggcagacggcaaccgcggcactgattcatcagaagcttctgccgatcatgaaggagctctttaaagcgcctaatccggctccggtcaaaacggcgctacagctgaaaggccttgatgtcggatctgtgcgtcttcctcttatcccgctgaatgaagatgaacgtctgagcctgagcagcgtcatcagcgaactgtaagaaaaaatttatacagttaaaatgcgcggtcattctcatttttatcgtgagtttgaccgttttgtatacatattggttttccctaaaccttccgcttcttcttgttttctaaaattgatatcagttataataggaacaagtgatgatggacgggtatgagactaggaggatacagattttgaaaaagaaaaatacagaaaacgtcagaattatcgcccttggcggcgtcggagaaattgggaagaacctatatgtcattgaaattgactcagacatatttgtagtggatgcagggctgatgcaccctgaaaatgaaatgctcggtattgatgtcgtcattccggatatttcctacttagtagaacgggctgaccgcgtgaaggccatctttctgacacacgggcacgatgaaaacatcggaggcgtcttttatttattgaacaagctgtcggtgccggtatacggaacgaagcttacgcttgcattactgagagaaaaactcaagcagtacgggcataatcgaaaagctgatttgcgtgaagttcactctaaatcagtcattacatttgaatcaacgaaagtatcgttctttaaaacgattcacagtattccggattcagtgggagtcagcttcaaaacatcacttggctctattgtatgcacgggagactttaaatttgaccagacgcctgcttatcaccaatcatgtgatattggcgaaattgccaaaatcggaaacagcggcgtgctcgccctgctttctgacagcgccaatgcggagcgcccggggtatactccgtcagaagcatatgtaagcggtgaaatttccgatgcgatgaacaattcagaaaaccgtgtcatcattgctgtattcgcgtctaatatcaaccggatccagcaagtgatacaggctgccgtccagaacggccgcaaacttgcaatcgccggaaaaaatctgcaaaacgtgcttcagcttgggcgcaagctcggctatattgaagccgaagatgaaatgtttattcctgtgcaggatgtgaaaaaatatccgaagcgggaagtggcaattgttacagccggaagccatggtgagccgctggccgctcttacgcggatggccaagcaggcgcacaagcagcttaacattgaagaaggagacaccgttgtcattgcatcaacaccgattccggggcatgaattgatatattccaaaaccgtcaacctgcttgcccgagccggcgctcaagtcattttcgcccaaaagcgcgtgcatgtgtccggtcacggttcgcaggaagaattgaaactcatgcttaatttgctgaaaccgaaatatttaattccggttaacggtgaattcagaatgcaaaaagcgcattccaaaatcgcagaagagatcggcatgaaacgcagcgacattttcttgattgaaaaaggtgacgtcgttgaattccgcggccagaatgtgaaaatcggggataaagtcacgtacggaaacgttctgattgacggcctcggagtcggcgacatcggcaacatcgtgctgagagaccgccgcttattgtcacaagacggcattctcatcgtcgtgatttcactcgataagcagaaaaagaacctcgtatcaggtcctgagatcattacgcgcggtttcgtgtatgtcagagaatcagagggtctaattgtacaagctactgagctcgtccgctctatcgtgactgaagcgacggaaacatctgccgtagaatggtccacgctgaaacaagccatgcgtgatgcgctgaatcaattcctttatgaaaaaacaaaacgcaagccgatgatcattccgatcattatggaagtataatgtatacaaagccggagcgcatgatgctccggctttgtttttgttcatgtcccggatggaaatcatcatctttgttcataatacaaagagacattcggaaagggtgaaagataaaatggatcatcgtatggaaaacaccgaagaacagcagcccgaaaaatcagatgcgaaagacagcattatgagcaaaattcagcagctgggagagacatctctgccgcaaatgtcccaagatagcaatattcactgcctgacgatcatcggccaaattgaggggcacgtccagctcccgccgcaaaataaaacaaccaaatatgaacacgtcattccgcaaatcgtcgccattgagcaaaatccgaaaatcgaaggacttctgatcatcttaaacaccgtcggaggcgatgtggaagcggggcttgcgattgcggaaatgctcgcatccttatcaaaaccgaccgtctcaatcgtactcggcgggggacactcgataggtgtgccgatcgccgtgtcatgtgatcatagttttatcgcggaaacagcgactatgaccatccaccccgttcggcttacaggtctggttatcggggttccgcaaacatttgaatacttggacaaaatgcaggagcgggtcgtcaactttgtgacccatcattcaaatatttccgaagaaaaattcaaagagctgatgttttcaaaaggaaacttaaccagggacatcgggacgaacgtagtcgggaaagatgcggctgattacggattaattgatgccgtgggcggcgtcggacaggcgataaaaaagctgaatcagctgattgaggaacgaaagggcgaggaaggaaggatgattcaatgatcctttataccgtcatgccccaagaagtcgtttacggtcaggaaatagagcaaagcgtgcatgaacaggtagattacgccggcgtgccgctgctagttgagatgaagggaaatgaagctgaagtcgtacagattttaagtacgaacccgatggatttcttaaatccggacatcgctccgggacaaaaaatcaagctgaaaatctaaccggcattcagtccgtttctcgggggcaaaatatgctataataggggaatcctacagaaaaatgcagccggcaaaaggctgcttttcttcatgatgtatgattttacattttttaacgcagtaaggtgatgagtgtggcaaagaaaaaacggaaatctaaaaagaaacaagagagtaagctcaatctaaaatacgaactaagcggactgctctgtgttgcaatctcaattattgctgttttgcagctcggcgttgtgggacagacatttgtgtacttgttccgtttttttgccggagagtggtttattttatgcttaattgcgctcttccttctcggaatttcgctgttttggaaaaagaagagtccaagccttttaacgagaagaaaggcagggctgtactgtattatcgccagtatattgctgctgtctcacgtgcagctctttaaaaatctgtctcatcacgggtcgattcggtcggcaagtgtcatcggcaacacgtgggagctgtttatgattgacatgaaacagcaggctgcttcccctgatttgggcggcggcatgatcggcgcggtactgtttgcagcttcccactttttatttgcatcaacgggttcacagatcatggcgatcgtgctgatcttaatggggctgattcttgtaacgggccgttcactgcaggaaacgctcaaaaagtggacgagccccgtcggccggtttatccgcggtcaatggcaggcatttcttgaggatatgaagacggtcagaacgaatatgtcttcgccgaaaacaaaaacaaaatcgggcaaaaaacaaaaacgggttcaaaagaaaaaagaagagcctgaaccggaggaagaggatgaggaaatcatttcgccgatcatccattcagagccgattatttcaagcttttcagaccgtcaggaagagcccgccgaaccgctgattccggaaaaaacgcaggaggctgcacaagcggtaaaagatgagccttccggcggcgctcaagacagtggcgaaacggctgcggctccgccgatgacgtttacagagcttgaaaataaagattatcaaatgccttcattggacatactggctgacccgaaacataccggccagcagaccgataagaaaaacatttacgagaatgcaagaaaactcgaacggacttttcaaagctttggcgtaaaggcgaaagtgacgcaggttcatctcggtccggcggtcacaaaatatgaggtgtatccggacgtcggggtcaaagtcagtaaaatcgtgaatctgagcgatgacctcgcgctcgcgcttgccgcgaaggatatccggatcgaagcgccgattccgggtaaatcggcaatcggcatcgaggtgcccaatgctgaagttgcgatggtttcgttaaaagaagtgcttgaatccaagctcaatgacaagccggatgcgaagcttctgatcggcttgggacgaaatatttccggggaagccgtgcttgccgaactgaacaaaatgccccacctgctcgtagcgggggcaacgggaagcggaaaaagcgtctgtgtcaacggtattattacgagcattctgatgagggccaaaccgcatgaagtgaagatgatgatgattgacccgaaaatggttgagctgaatgtgtataacggcattcctcatctgcttgcgccggtcgtgacagatccgaaaaaggcctcgcaggctttgaaaaaggtcgtcaatgagatggagcgccgctatgagctgttctcccatacgggtacgagaaatatagaaggctataacgatcatattaagcggtcaaatgccgaagaagaagtcaagcagcctgagctgccatacatcgtcgtcatcgttgacgagcttgccgatctgatgatggtcgcttcttccgacgtggaagattcaattacgagactttcacagatggcgcgggcggcgggaattcatttgattatcgcgacacagcggccttcagtcgacgttattaccggtgttattaaagccaacatcccgtcaagaatcgccttcagtgtctcatctcagaccgattcacggacaattttagacatgggcggcgctgaaaagcttctggggcgcggagacatgctgtttctgcctgtaggcgcaaataagccggtgcgtgtgcaaggggcattcttatccgatgaagaggttgagcatgtcgttgatcatgtcattacgcagcaaaaagcgcagtaccaagaagagatgattccggaagaagtttcggaaacacacagtgaagtaacggatgatctctatgacgaagcggtcgatttgattatcggcatgcagacggcatcagtctccatgcttcaaaggcggttcagaatcggatatacgagagctgcccgtctgattgacgcaatggaggaacggggcgtcgtcgggccgtatgaaggaagcaaaccgagggaagtactattatctaaggaacaatatgatgagctctcttcttaaaaaggagagagttttcactgaaaatgatatcaccaaaatcattcctatttatttttttatcaaaacatgatatagttgtcccaattgttcaataatttatgaaagtggtttacggaggggaaacatgtctacaaaagctgacaatcgtcacttgtatctaaaagtgattgagcgaatcaaagaggatatacaaaacggaatttacaccgaaaaggaaaagcttccttctgaatttgagctttcaaaatcaatgggtgtcagccgggcaactctgcgtgaagctttgcgtatccttgaagaggagcatgtgattatcagaaggcacggtgtgggcactttcgtccatacaaaaccgctgtttctttcaggtattgaacagctcaacagcgtgacgaaaacgattcagcaggcgaacatggtgccgggtacgatttttttgtcgtctcaggtcatcaccccgtctgatgaagatatcgctagattccggcttgagcctgagcaggagcttttttatttggaacgcgtgagaacggcaagcggcactccggtcgtttactgtttagatacgattccgatgcacattctgccgaattctttctgtcatgaacaggagtctatttttgatcttttggaaaaaaactccggatctgtgatcagctatgccgttgctgatatcgaaccgatcggatatcacgatacgatttcaccggttttggaatgcgagccggagacggcgcttttattgctgaagcaaacccactataatcagaatgatgaacctgtgctgtattcattaaattatttccgggctgataagttcagttttcatgttgtaagaaaacgtttttaagacagacgcgtcatgtgtctgtttttttatttgccgtttcagtacatactttgttttctgcaaggcacaataaaacaggaaacaaccaagtatagtgaatgggtgaataagttgagtaagaagaaaaatggaacgaaaaatatcattgctctggcttctgtaccgctcgtgatgacactcgggaattccatgctgattcctgtgcttccgatgattgaaaagaagctgtccatatcgtcttttcaagtatcgttaattataacggtctattcgattgtggcgattatttgtattccgattgccggatatctgtccgataaattcggaagaaaaaaggttcttctgccttgtcttctcatagccggtgcgggcggagcgcttgccgcgatagcttccaccgcgttcaagcatccttatcccattatcttggcggggcgggtgctgcagggaatcggttcggcaggggcggctcctgtagtgatgccgtttatcggtgatttattcaaaggggatgatgagcggattaccgcggggctcggcgatattgagacgtctaacactgccgggaaagtaataagcccgattctcggttcgctcttggctgcatggttttggtttatgccattttggttcattccgtttttttcgctcatcagtttttttctcgtattgtttttggtggcaaagccggaggaacaaaaagaagcgccttctatttccgaatttgtgaaaaatgtcggccgcatatttaagcgtgacggacgctggctctttacggtttttatcatcggctgcgtgattatgtttttgctgttcggggttcttttttatttatcagactcactggagaagaaatacggcattgacggtgtggctaaaggagcgcttttggcaatcccgcttttatttctatccgtcagttcatatatagcaggcaggaaaatcggaaaagaccaaggcaaaatgaagttttgcatcgttttcggaatgagtgccgtgacactgtcgtttatcggcctatggtggaatcacagtttttatttattatttatctttttgtgtgtcagcggtatcggtatcggaatggcattgccggctttagacgctgtcatcacagaaggcgtagacaacgaggaatcaggaaccatcacctcattttataacagcatgcggtttatcggagtagcggcgggaccgccgatctttgctgccctgatgtcaaatgcaggctggctgatttttattttatccgctttttgcggcattgtgtctgtatttttagcgctgttaaatatctcatcacaagcaaaagaaaaaaaggaatcattaaagacggtgtaatctgcactgtcttttttattttattttgaagattgacatgataccgtcaagtcgttattctttttaatagttaaacatattaactattggaaggagggggaaaaggtgcatgaagaaaaagtaaagcagctgattcagcgttattccgatgtatacctgcacgtcttaaaaaaaattgacagcattatcgctgaaaaagtgaacaaagaactgacattggatcaatattacatcctccgctatattatgctcaatcccgattgcaaatcaattgaactggccgcggtgtgccacgtcaataaaagcgccattacatctatgacgaaccgcctgtatgaaaaaggctacatcaatagagaacgcagccaaagcgaccgccggagcatacttttaaatgtcacggaaaaggggacggaagtatttcatcgtgttgagcggcggattgaggaactcgtccgttcatatattatgtattttgatgaagacgaggcggagatgttcgtgaatacatatgaaaaattatatcgattgatgatgactgaggaggatcagcagacataatgaaaaacattatccgagcccgctggatcatcgccgcggtgtgggtcgccgcaacggtgatatttatgcttacagcgcctgatatggctgaattgacacgggagaaagggcagatttccgtaccggacggatattcctcttcttacgcccatgaattgcttgatgaaatgtctgattccgatgcaccgtcttcttctgccgtcatcgtatttcacgaaaaaggcttaatgacagacaaaaaaaatcgtctggaagaagccgtcagcactttgtctgaacataaaaaagcgcttcagattaaaacagtgacttcatacttcggggagaaaaatgacgacattaaaaaacagctgctctcaaaagacagacaaacgatgctcgttcagctgcagcttgatacatccaaaaacgatatcatcgaaataaaaaataaaattgataaagagctgaaaccgtacggcgtatcatacggcattacaggccaatcgctgatcgacgaagatgtgttaaaaagctcacaggacggcttgaaaaagactgaatatataacggtcgcttttatcctgatcgtgctgatccttgtatttcggtcagtggtcgctccgttcgtgccgcttttatcagtattgatatcttatttagtcagccagtcgattgtcgcatttttagtcgatcagctgaattttccgctctcaacttttactcagatttttatggttgcaattatgttcgggatcggcacagactactgcattctgcttctcagcagatttaaagaagaactgtcgcatggcgctgatataagagaagcgatcgtcgtcacctacaaaacggccggaaagacggttttgtacagcggcggtgcggtgctgatcggatttgcttgcatcggatttgcgacatttaagctgtatcagtcggcagcggccgttgcggtcggtgtcgcggtgctgctgcttgcgctcatgacgatcgtgccgttttttatggctgttttaggaaaaagcctgttttggcctgttaagggcgatatttcccatcctcaaagcaaagcatgggaaacgtcagggcggttttcatttaaaaggccgctcatcagtcttgcaatcgttgcggtattcaccgtcccgcctatccttctttacaaagggtcgctgtcttacaacagtcttgacgaaatcgaggataaatatgaatccgtccgcgcgtttcatacgatttcagacgcattcggcccgggagaacttcttccggccacagtcgtcatcaaaaatgatgagacattaaataccgaaaaacacctgattgatatcgaaaaaatcagcagagaacttgaaaaaacagagggtgtaaaaacggtcagaagcgccacgcgccccgctggaaacggattgaatcaattatttgtcacaaatcaggcaaagcagcttcaagaagggcttgataaaggcaatacaggacttgaaaaaatcacggacggattagggcatgccgcaaagtcgttagctgattcacagccgcagatcgaagagtcgggcaaaagcgtcaatcagcttattgacggaacattgtctctgaaatccgggctttctgatataggagaaaacctgaataaactgcaggctggcgtgaacgagaataaagccggcgtcgcccagatgagaaagcggattgaagagcaaaaacaaatgctgacttcacagctcaaacaaaacagcggtctcgcttcagaaacgcaaaacgctttaaaattggtaaaaaccgtcctgccgatgaaagatgaagccagcagacagcttgccgatttgaacaagcagcttgcccggctgccgtttgcaaaattggaagcgtcaataccgtcagtcaaaaccgatccctcttaccaagaaatcaaatcggcctttacgggtgtacagtcagccgtttccaaggcaaacgcggatgcagaagctttttctaaacaggtcgacagtcaaaaggctcatctgcagcaagcggaaaaacaatttgcccgactggcagccgctcagaagaagattgacactcaaattaacgcaatgatcaatggtctgaccagtattgaaaacggtctgcagcaagtgtcagacggacagggggctctcgcgggacaaatgccgcgccttgaatcggcggcaggacagctcgccgagggccagaaaaaaatgaagagcggtctcggtgatttttcttcccggctcagcgaactttcttccggccttaacgacagtgtaaaagggcttaagaaagtatcaagcggcatgatgggggcgaatgattacctgggtgagcttcacaaggcgtcagacaaagaaatgacaggctggtttgtgccgaaagacgcgttgacaaacagtgatttcacaagcgtgtttaatacgtacatgtcagatgacagaaaaacgacagaattgactgtcgttcttgataacaatccttactcaaatacggccattcaagatattcaagcgatcaaagcgagcgtaaaaagggccattccgaacacggatctgaagaatgcctctttcggcgtttcgggagtctccagcatgaatgccgatctgaaggaagtttcggcttcagacttcaaacggacggccatgtttatgctggcgggaatttttctgattctcatcgtgatgctgcgctccctcattatgcctgtttatttagtggcgtcgctcgtactgacgtatttcgcatccatcggcgtgacggaatacatctttacacacttcttcgggtatccgggcgtaaactgggccgtgccgttcttcggctttgtcattttgatggctctaggcgtggattattccatctttttaatggaccgctttaatgagcttaaaaaagaaggaacggaacccgcaatgatcagcagtatgaaaaatatgggttccgtcatcatttctgcagccattattttagcgggaacctttgcggccatgctgccgtcaggcgttctttccttattacagattgcaaccgtggtattaacaggccttctcatgtacgcaattgtcgtccttccgttttttgtaccggtcatggtgaaaatattcggaagagccaactggtggcctttcaatttgaaaaaataacgctcaatgcctctgcctgttttcgggcagaggttttttgtttccttataaatcctccagttgatataattacatctgcgcactcttttttgcgaatgctgaaatttggtcataatacatactatgaaagaatgaacgaaggaggtttcacatgacttacgtaaatgaaatgaagtcaaagcacggcgggatcaccgcccacatcgtaaagaccgagaaatttaaaaccgtttcgctgacgtttaaaatgctggctcctttaacgaaagagctcgtaacaaaaagggcgctgtttccgcatgtgcttctgcgcggaacagaaagccgcccgaaaaccgctgatctgcggtcttattttgatgaactgtacggcacatccgtttcagctgatctgacaaaaaagggagaacgtcatgtcattacgttcagacttgagattcctaatgaaaagtatctgaaggaccgcacaccgttattggaaaaaggccttcagcttttatcagagcttgtcttttcgcccgctttggaaaacggcgccttcctgcccctttatgtcacgcaggaaaaacggacgctgaaacagcggattcaagctgtatatgatgataagatgagatattctaatctgcgtctcgttcaggaaatgtgcaaaagcgaaccgtatgcccttcacgtcaacggcgagttcgatgatgttgaacacattacaccgcaagatttgtatgaagcctatcaaaaagccatacgcgaagatcagctggacctgtacgtcatcggcgatgttgatactgatcaggtgaaaacggccgttgatacgtattttaaaacggaagaacgggagctgcagccttttgaaagaagcgcggcgaatgaacagcccgatccgaaggaagtcattgatgaagaggacgtcaagcagggcaagctgaatatcggattccggaccaatacgacatatacagatccggattatccggcattgcaggtgtttaacgggctgttcgggggtttctctcattcaaagctgtttataaatgtccgtgaaaaagcgagcctcgcctattatgcagcctcaagggtggaaagcttcaaagggcttttgatggtcatgtcgggcattgaggtgaaaaattacaagcaggccgtcaccatcattgaagaacagtttcaggctatgcaaaacggtgacttttcagaagatgatatcgcccaaacgaaagccgttattaaaaatcaagtattagaaaccattgatacggcatacggcttagcggaatttctgtatcagcaggcctcagcccaagtagagataccgatcgaaaaattccttgacaatatcgagaaagtgacaaaagaggacattatcaatgtcggaaagaacattaagctggatacgacttatttcttaaaagggacggggggagcatcttgactaaaccgataaacttcgaacagcttcaggaaacgctgtatcatgaaaaaatggcaaacggccttgatgtctatgtgctgccgaaacagggctttaataaaacatacgctgtgtttacgacaaagtacggttccattgacaatcaattcgttcctttaaataaggaagaaatggtacacgttcctgacggaatcgcgcattttctggagcataaactgtttgaaaaggcggacggcgacgtgtttcaggacttcagtaagcagggggcgtcggcaaatgcctttacatcatttacacgaaccgcttatctgttctccagcacttctaatgtggagaaaaacctggaaacactcgtggattttgttcaggacccgtatttcacggaaaaatcagttgagaaagaaaaaggcatcatcggccaggaaatcaatatgtatgatgataatccggattggcggctgtttttcggccttatcgaaaatatgtataaagaccaccccgtgaaaattgacattgccggaacggtggagagcatctcacatattacgaaagatctgctgtatgagtgctacgaaacgttttatcacccgagcaatatgctgctctttatcgtcggtcccgcagatcctgaagcggtcatcagccaggtgcgggaaaaccaggagaaaaagccgtttacagaccagcctgaaatcaaacgtgaagaagttcaggagcaggaagcggttttccgccgggagcaggaattaaaaatgaacgtgcaaggctcaaaatgtcttgtcggtttaaaggcgaaagacccttataaaacggggcaggagctgttgaagcatgagctcagcatgaacctcatgcttgaatgtctcttcggaaaaagctcaccgcattacggtgacttgtacgacaaaggctacattgatgaaactttcagctttgattacacggctgaatacggattcggttttgcctctgtcggaggagatacaccggagccggataagctcgctgacgaattaaaacacatgctgcttgatgcagaatcagccgtgactgcggaaaaacttgatcttgcgagaaaaaagaagatcgggtcattcttaaaagcgctcaattcgcctgaatatatcgccaaccaattcacacgctacgcctttttagatatgagtctgtttgatgtcgtaaccgtactggagcagattacgctggaagacgtaaagcgggtcattaaagaagaaatatcagaagacaggctgacagtctgcaaagtcgtgccaaaatcataacaaaaacatccctcacgccctgagggatgtttttctggggaaagaaggagtattgattgatgaaacagacagcgctcgtaaccggagcaagcggcggaatcggacaaagtataagtgaagtcctcgcaaaaaacggatatgacgtccttttgcattatcattctaataaggaagccgcacacaagcttgcggaaaggctgagcgcatcattcggcgtaaaaacctccgttattcaggcggatctgtcctcaccggatggcgcggagacactcagccgttccgttaagcagcctgtggacgctctgatattaaacagcggcaaaagtcatttcggcctgattacggacgttatggatgacacggcgcgggagatggtgcagctgcatgtgacgagtccgtttcttttggcgcgtaatctggtgcccggcatgatccggaaaaaaagcgggggcatcgtcgcgatcggttccgtctggggagaaacaggcgcatcgtgcgaggtattatacagcatggtcaaaggagcgcagcattcgttcgtcaaagcgcttgccaaagagctcgctccgagcggcgtccgcgtgaatgcagtctcgccgggtgccgttgatacaaatatgcttgatcagttcacgtctgatgaaaaagaagcgttgacagaggaaattcccgcgggccggctggcaaagccggaggaaatcgccgaagcggcggcttttttattatcggacaaggcttcctatattacggggcatatattatccgtaaacggcggctggcactgctgaaaaaaatgtgtgtatagtttgcatctgtacggacaaaataattttgtaacaacagatgaaatggaggaacccaacatgtcagtattagaaaactgggataattggaagaatttccttggcgacagattgaactatgcgcaggaaaaagggatgagtgatgatacgatcactgacctcgctacagaaatcggcggctaccttgcgaacgaagtcgactcgaaaaaccatcaggaaaaagtgcttgctgatctttggagtgttgcttctgaagatgaacagcgcgccatcgcaaatatgatggtgaagcttgttgaaaataacagcactcattaagaggggggatttctcctctctttttttatgttttcctctatagagcaacattcttctttctaattagagaaaaatgttttatgataaaggaaggtaaaaatttgccacaatggagggggtatatcatttggcaaagctcgaatggtattttgaatatgaaattcaagtgaaccgccccggcctgctcggggatatttcatctcttctcgggatgctgtcaattaatattgtcacaattaacggtgtcgacctttccagaaggggaatgctgctcagatgccggcatatagatcaaattaaacgattggaatcaattttaaaaacaatggagaccattaaagtaacgaagctgagagaaccgaggcttcgcgaccgtctcgcagtccgccacggaagatacattcagcgtgatgccgatgacaaaaaaaccttccgttttgaaagggacgagctcggtcttctggttgactttatggccgagctgtttaaaaaagaagggcacaaactgatcggaatccggggaatgccgagggtcgggaaaacggagtccatcgttgcgtcaagcgtttgtgccagcaaaagatggcttttcgtatcatcaacgctgctaaaacaaacgatccggagccaactggttgccgatgaatacagcacggaaaacgtgtttatcctcgacggcatcgtttcgacaagacggggatctgagcgccatcttcagctcgtcagtgaaattatgcggcttccggcgacaaaggtcgtggagcaccctgatatttttgttcaaaattcggagtatacgctcgatgatttcgattatattatcgaactcagaaatgatcctgacgaagtcattacatatgaacatgcagaagaaccgcaaatgtttgatcagaccggtttttcaagctttgatttttaatattggaaggtgtttgttgtgacagaattagcaatccggcttaaagaagccagagaggaaaaagggatgtcgttggatgaactccaggcggcgacgaaaattcagaaaagatacttaaccgctctggaagaaggcaattatgacgtcattcccggcaatttttatgtgcgggcgtttatcaagcaatacgctgaagctgtcgggcttgattcagatcagttatttgaagaatataaaaaagacatccctaacacgtaccatgacgatgtgtcggaaaaaatctccggtctcgccatgcaaagggagcttcctaagtccgcttcaaaggcggcggaatggcttccgaccgtccttgtcgtcatcggtgtcattatcgtcatcgcgatcatttatgcgattattcagctcggaatgagcaaatccgggcagacagacggagataaagccgtcacccaaagtgagagcaagtatgagattcctaaggattctgcgctgaaaaacgacggcaatacaaatgacgaagcgcaatctgacagcaagaaagacaaaaaggacacaaaagcgtcagagcagaaaaagaaagaaaaaagcagtgaaaagacagagatcaaagcggccggaacggaaggctcggcttcttcatacaacgtctccgggacagataagtataagcttgaactgattgcttctgacagcgcatggatccgcgtccgtgatgacagcggcggttctttaaaagaaggaacgctgcaaaaaggcgaaacctttaaaaaagacgtcacggatcaaaagcagattgaaatccgcacgggctatgcccctaacctgaaaattaaaatcaacggagaggttctgtcctatgaactcaatccgcatgatgtgatggcgcagaccatcacaatcaagatgaaaaaataaaaggggaaaaagtcatctgaacgattaagatgactttttcttcacgtccgagtacatatattggaggggctttatgtttaacttaccgaataaaatcacactggcaagaatcgctttaattcctgtatttatgattatcatgcttgttccttttcagtggggcagtgttcatataggggatgaatcgattccggtcgcgcatcttacgggagctgttttgttcattatcgcatcaacgactgactgggtggatggctactacgccagaaaactgaacctcgtgacaaacttcgggaaatttttagatccgctggctgacaaactgctggtgtccgcggcattaattacgcttgtgcagtttgatcttgcgccggcgtggatggtcatcatcatcatcagccgcgaatttgccgtaacgggattaagacttgtgctggcgggaacgggggaagttgtagccgccaatatgctggggaaaattaaaacatgggctcagatcatcgctgttgccgcgcttttgctgcataatcttccgtttgagctcgtttctttcccgttcggcgatatcgctttatgggtggccgtgctcttcacagtcatttccggctgggattattttgcgaagaactgggatgcgttaaaaacatctaactaagaaagaaggacttaaagatggaaatagcaaaaaaagcagaaatcattgcagtcggctcggagcttctgctcggccagatcgccaatacgaacgcgcagtttatcagtaaagagctggcggaaatcggtgtaaacgtgttttatcataccgctgtcggtgacaatccggagcggcttaagcaagtcatccgcattgccgaagagcgctcagacctgattattttttcaggcggcctcggaccgactaaggacgatttgacgaaagaaaccattgcaaacacactggggcgcccgctcgttctgaatgacgaagcgttccggtcgatcgaagaatatttcgcgaaaacaaaacggaccatgtcgccgaataaccgcaaacaggcgctcgtcattgagggctcagacgttttggcgaatcatttcggcatggcgccgggaatgcttgcagagcacggctcaaggctttatatgctgcttcccgggccgccgagcgagctgcgtccgatgtttgaaaatgaagcgaagccgctgcttcttaaaaagctcggttctaatgagaaaatcgtttcaaccgtgctgcggtttttcggaatcggtgaatcccagcttgaagctgatttagaagatatcattgatgcgcagacgaacccgacgattgcgccgctcgctgctgacggagaggtcacgctgcgtttaacggcgaaacatgccgacgaaaaagaaacagaacggcttttaaaagaaacggaagccgccattttagaacgtgtcggtgaatttttctacggatatgatgatacgtctctggtgaaggagctttcaacagcatgcagacaaaacggaattacgatttcttctgccgaaagctttacgggcggcctgttttcagagtgggtgactgatttaagcggtgcgtctcaactatttgcagggggcgttgtctgttattccgacagcgtgaaacagcatgtgctcggcgtgaaagctgagacgctcgcagaaagcggagcggtcagcaaagagtgtgcgaaagagcttgcagccggtgtgagaaagctgaccggaagcgatatcggcatcagctttaccggggtggcgggtcccgacccgcaggaagggcatgcgccgggccgcgtctttatcggcattgcggcggaaggaaaagaagaggtgcacgaatttaactttgccggctcaagaaccggaatcagaaagcgcgccgctaaatacggctgccatctcattttgaaaatgctggatcaaaaataaagttttaaagagccgttttctctgatttttaagttttataagggaaattatgctcttttgcagaaaagcgaacgcaaaaaaatccgaatatgcgttcgcttttttcttggcaaatgccagtaaacaaggtatagtatatgtagtggcaagataaaggaggaaaaaataaatgagtgatcgtcaggcagccttagatatggctcttaagcaaatagaaaaacaattcggcaaaggttccatcatgaagctcggagaaaaaacggatacaagaatttcaacggtgccaagcggttcccttgcacttgataccgctctcggaataggcggatacccgcgcggacggattattgaagtatacggacctgaaagctcaggtaaaacgactgtagcgcttcacgcaatcgctgaggttcaggaaaaaggcggacaggcagcatttattgatgctgagcatgctcttgatcctgtttacgcgcaaaagctcggtgtcaatatcgaagagcttctgctttctcagccggatacgggagagcaggcgctagagattgctgaagcgctggtgcgaagcggagctgttgatatcgtggtcgttgactctgttgcggcgcttgttccaaaagctgaaattgaaggtgacatgggtgattcacacgtcggtttacaggcgcgtcttatgtctcaggcgctccgtaagctttccggcgctatcaataaatctaaaacaatcgcaatctttattaaccagattcgtgaaaaagttggcgttatgttcggaaatccggagacgacaccgggcggccgcgcgctgaaattctattcttccgtgcgccttgaagtgcgccgtgccgagcaattaaagcagggcaacgacgtgatggggaataaaacgagaattaaagtcgtaaaaaacaaagtcgctcctccgttccgtacggctgaagtggacattatgtacggtgaaggaatctccaaagaaggggaaatcatcgaccttggaactgaactggatatcgtgcaaaaaagcggttcgtggtattcttatgaagaagaacgcctcggtcagggccgtgaaaacgccaagcagttcttaaaagaaaataaagacatcatgctgatgattcaggaacaaatccgtgaatattacggtttagacaataacggtgtaacggacaaagcggaagaagttcaggaagagatggaattagaagaataaaaacacgatcaaaagagcggaataagcaatttccgctctttttttgtgtgtttcaaaaaaagactggctgtttcggaaaattttatctggaatgttacaacttttttcacccttcactcgtctaacatcatggcgaaagttgaaattatatctgaggaggaaaaaagatgacgagcccccgccgcacaagaataaataaaaaaagaaagaagaagctgatgaaaacgggagggctgtttctttttctgctgcttgtcactgtttttattatgatctggaccgtcacagcgcatcaccgggagaaggaatccgttaaaagcgctcccgccgctcaatctgatacttcaaaagaccagactcaacagaaaaaagaaaagacgcaaaaagagaaaacacctaaatcaatcgaacacaataaacagatcagcaattacttgcaacagatcgggttcagcggcacagcaatgatcgtaaaagatggaaaggttgtgctgaaaaaaggctttggctatgcggatcgaaaacaaaaaattaaaaacaatccggagacatcatattatatcggttcttcacaaaaagcgttaatcgcgacggctgtcctgcagcttgaagaaaaagggctgctgcagacgagtgaccccgtcagtacatacttgccgaattttcctaacggcacgcgcattacattgaaaaacctgctcaatcatacgtccggcataaacgggcatattgagggacagggaccgatttctccaattgatttaatcaaggatatagaataccgcggaattaaacggcagcccggggtttgggattacagggattccaactattcagtgcttgcttatatcgtatctcaagtcagcggggagtcttatgaacaatatataaaagaacacgtgttcaaaccggccggaatgaagcatgccggattttacaaaacatttgccaaagccaaatatcctgccgtcggctacaaagtcgatgagagcggcagtcttgtaacgccgcaccttctggacttatcgcagctgtacggggcgggcgacatgtatatgagcgctgaagatctctataaatttgataaagcgatcgtaaatggcacgctcctttcaaaagaaagcttcacaaaaatgtttacagcaggaagcagtgccgcttacggcatggggttttacattgatccgggaagctattccaatcacggtgttatgcccggttacaacattttgaacagcttcagccattcggcaagcaaatatgtcatattactgtcaaacattcagaataacgccaaattaggacaggtaaacaatagaatttaccaactgcttaaccagccggactaacagagccgtcattcacgaaaagcggatgaaggtatggtatgatatatacatgggcgaagatccgagctgaaggcgaatcgttaagctggcaagcttgacaagtatttccgacacaattacaatgaagttgtaacatttgtttttttaacatgattgttaaaccatttaaacttgacaagggcatgagagactcattccctgtgaaggttctgtatgttgagaaaatcagacaatgtacatgccggcacttatttaagcaaaaaccaagttcatagcaagaggaggtgaaagtatgaccccaatgacggttctcatctccattttgctgactctgctcggtttagttgttggctactatgttcgtaaaaccattgccgaagcaaagattgcgggcgcacgcggtgctgccgagcaaatccttgaagatgcaaagcgtgatgctgaagcactgaaaaaagaagctctgcttgaagcaaaggacgaaatccatacacttcgaatagatgctgaacaggaagttcgtgaaagacgaaatgagcttcaaaaacaagaaaaccgtttacttcaaaaagaagaaaatcttgaccgtaaacatgaaggaattgataaacgggaagcgatgttggagaagaaagatcattctctgaatgaacgacaacaacatattgaagagatggaaagcaaagtggatgagatgattcgtatgcagcagtcagaactcgaacgcatttcgagcctgacacgggatgaagcgaaacaaatcattcttgaccgggttgaaaatgagctttcacatgacatcgccatcatgacaaaagaaaccgaaaaccgtgcgaaagaagaggcagataaaaaggcgaaaaacattctgtcgcttgctttgcagcgctgtgcagcagatcatgttgccgaaacgacggtatcggtcgtcaatcttccgaatgatgagatgaaaggacgtatcatcggccgtgaagggcgtaacattcgtacgcttgaaacgcttacaggtattgacctgattattgatgacacacctgaagcagtcattctttccggatttgatccgatcagacgggagacggcaagaatcgctcttgataaactcgttcaggatggccgtattcacccggcgcgcattgaagaaatggttgaaaaatcccgccgtgaggtagatgactatatccgggaaatgggtgagcagacgacgtttgaagtcggcgttcacggactccacccggatctgatcaagatcctcggccggttgaaattccgtacaagctacgggcagaacgtactgaaacattcaatggaagttgcgtttttagcaggtttaatggcttccgagcttggagaagatgcaaagcttgccaagcgggccggtcttctgcatgacatcggaaaagcaattgaccatgaagtggaaggaagccacgtggaaatcggagtggagcttgcgaccaaatataaagagcatccagtcgtcattaacagtattgcgtcacaccacggagacgaagagccgacttccattatcgccgttctggtcgctgccgctgatgcactgtcagccgcaagaccgggcgcgagaagtgaaacgctcgaaaactatatccgcagacttgaaaagcttgaagaaatctccgagtcttacgaaggtgttgaaaaatcatttgcgattcaggccggccgtgaagttcgcatcatggtgaagccggactccattaatgatttagaagcccatcgtttggcacgtgatatccgtaaacgaattgaggacgagcttgattatccgggccacattaaagtgaccgtaatcagagaaactcgagccgtagagtatgcaaaataaagtgatgcttagcgcatcactttatttttttgagtccctgaaaaggaaggaatggaatgtatgagaattttatttatcggagatgttgtcggttcccctggccgcgacatggtaaaagaatatgtcccgaaactgaaagcgaaacataaaccgcattttacaattattaacggagaaaatgcagcacatggaaaaggactgacagaaaagatctaccacagcctgatggaagcgggagcagatgccattacaatgggaaaccatacgtgggataaaagagagatcttcgactttattgatgatgtgccgcatcttgtccggccggcgaatttcccggaaggtacgccgggcaaaggcattacttatattaaatcgaacggaaaagagcttgccgtcattaatttacaggggcggacgtttcttccgccgcttgatgatccgtttgctaaagcggatgaattaatagaagaagcgaaaaagcgcacgccgtacatttttattgattttcacgccgaagcgacaagcgaaaaaattgcgatcggctggtacacagacggaagagcctctgccgtggtaggcacccatacacacgtgcaaacggcagataaccgcattttgccgaaaggaacggcatatattactgatgtaggcatgacgggtccgtacgacggaattctcggtatggacagagaaacggtcatcaagcggtttaaaaccaatcttcccgtccggtttacggtggcggaaggtaaaactacgctgagcggagtgctcattgacatcgacgatcaaacgaaaaaggccgtaaatatcgaacggatattaatcaatgatgaccatatgttctttgaataggtgatcatgtgtttattttataaaaatattaaaaggaaaagcaggaatatagcaacttcttagtgaatatagtagaaatggaaggtagcccgctatttttgaaaagcattgtggggatggctttttggatagcaacatctaataatgattgttctaatgaacactcacttatccattgtaaaactaagggggagcagaaatggaaatcttaaaagtttcagcaaaatcaagtccaaattcagtagcaggcgcgcttgccggtgtattgagggaacgcggagccgccgaaattcaagcaattggggcgggcgccttaaaccaggctgttaaagcggttgcgattgccagaggctttgtcgcgccaagcggcgtagatttgatttgtattccggcttttacagatatacagattgacggagaagaaagaacggcgattaagttaatcgtcgaaccccgttaaaaacaaaaacatgacattctcaacctgcttgcgtaaggcgagcgggttgtttttattgttgtcatattttctcacaatattatattgatagtacgaagagatgataaatggctttattcatataatattcaaaaaaaatcccgcccatttttccggacggaagcagttgttttctcggagtggacactggtatttacctcctttttatatcatgttacaatccagttattacagtgttttttcgaggaggagtgtacatgttgggaggaaagatgaaagctatcgtcaaaaatgaaaacgctttcggagcaactctgaaagaaattcccataccttccattaatgagaatgaagttctcattaaagtacaggccgcatctatatgcggtacagatgtgcatatttataattgggatcaatgggcgcagaaacgaatcaaaacacctcaagtattcggacatgaattcagcggtatcatagcggaaacgggcaagcacgtcacaaatgtcaaaataggtgactacgtttcggctgaaacccacttcgtctgcggtacttgtgtcccctgtttaacaggaaaacatcatgtgtgcacccatacaaagatcctcggcgtagatacagccggttccttcgctgaatatgtcaaagtgccggctcgaaatgtttggaaaaatcccgctgatatggaccccgccgtcgcttctgttcaagagccgcttggcaacgcggtgcatacggtgctggaaagcagccagcttgcgggcggttccgctgcaattatcggctgcggaccgatcgggctgatggcggtggcagtggctaaagcggccggtgcatcccgtattgcggcgattgataaaaatgattacaggctggctcttgcgaagaaattgggagccacgatcaccatttcagctgataaggaagatccgcttgaggtgatcgacaccttaacaggcggagaagggatcgaccttgtctgcgaaatgtcaggccacccggcagctatagcacaagggttaaagatggcggccaacgggggaaggttccacatgctgagtctgccggaacgtccggtgacggttgacctgacaaatgacgtggtgtttaaaggacttaccgtccaaggcatcacaggcagaaaaatgtttgaaacatggcggcaggtatcgcacctgcttgaatccggccttgttgatctgacgccggtgatcacgcatcagtttccgcttgaagactttgaaaaagggtttgacctgatgagaaagggccagtgcggcaaagtcattttgattccataaggggagggttctataatgaaagaatttgaatttctaaaagcagagcttgataaaatgaaagaaaataaaacgtggcagcaaatgaaacaaattgaaacgaagcagggtccgtcggtggaagtcaaaggggaaaacgtgatacagctttcatcgaacaattatctcggtttgacgtcgcatccaaggcttgtcgaagcggccaaacgcgccgcggaagaattcggagcgggtacggggtccgtccggacaatcgccggaacattcacaatgcacaatgagctggagaaaaaattggcaaactttaaaaaaacagaagcggcacttgtttttcaatcggggttcacaacgaatcagggcgtcttatcaagcattcttacaaaagaagatatcgtgatctctgacgaactgaaccatgcttccattattgacgggatcaggctgacgaaagcagataaaaaggtgtaccgccatgttgatatggacgatttggaaagggtgctgaaaaaatcaatgaattaccgcatgcgcctgatcgtcaccgacggcgtattctcaatggacggcaacatcgctcctttgcctgacatcgtcaaacttgcagaggcgtacgatgcctttgtgatggtcgacgacgcgcatgcttccggcgtactcggaaaaaacggaaggggaacggttaatcacttcgggcttgacggaagagtccacatacaggtgggcacattaagcaaagccatcggagtgcttggcggttatgccgcagggtcgcaggttctgatcgattacctgcgccataaagggcgtcctttcttattcagcacttctcatccgcctgcggtaacggccgcatgcatagaagccattgacgtcctgctggaagagccggagcatatggaaaagctatgggagaacacggcgtatttcaaagacaaactggttcaaatggggctgaccctcacaaaaagcgaaacaccgatcgtgccgatattaataggggaggaagaaaaagcccaggcattatcagaccttttattgacccgcggcgtctttgcacaaagcatcgtgtatccgacggtcgcccaaggaaaagcgagaatccgcaccattattacggcggagcatacaaaagaggagcttgaccgggccctggaagtaatccgttcagccgcaaaagagctccagcttgtgtaagggggaaatgattccctcttttttatttcttattgattcttattctcaataaggtgtacaataataggctggcggttgtgtcaaacgcttttaaccagtatacttgagggtggaagtttcggttgaaaggagacattcgaacatgaatgaaaagcaaaagcaggaaagcggacaagtgaatccggcggacaaaacatccgaaaaggattacagcaagtattttgaagccgtatatattccgccttctttaaaagatgcgaaaaaacggggcaaagaatccgttcaatatcataacgattttaaaatctcagaagaatttaaaggcctcggtgaaggcaggaaattttatatccgcacgtacggatgccaaatgaacgagcatgatacggaagtcatggcgggtatttttatggcgctcggttatgaagcgacaaattcggttgatgacgcgaacgttattttattaaacacttgcgctatccgggaaaatgctgaaaacaaagtgttcggcgagctcggccatttaaaggcgctcaaaaaaaataacccggacctgattctcggcgtctgcggctgcatgtcacaggaagaatcagtcgtaaaccgcatccttaagaagcacccgtttgtcgatatgattttcggcacgcacaacattcaccgtctgccggaactgttatcagaggcatatttatcaaaagagatggtcattgaagtgtggtcgaaggaaggggatgtcattgaaaaccttccgaaagtccgcaacggaaaaattaaaggctgggtcaacattatgtacggctgtgacaagttctgcacatactgcatcgtaccgtatacccgcggaaaagaacgaagccgccgtcctgaggaaattatccaggaagtcagaagacttgcaagcgaaggctataaagaaatcacgctgctcggtcaaaacgtgaatgcgtacggaaaagattttgaggatatgacgtacggtctcggtgatttaatggacgaactgcgtaaaattgatattccgagaatccgattcacgacgagtcatccgcgtgactttgatgatcatctgatcgaagtgctcgccaaaggcggcaaccttcttgaccatatccatcttccggttcaatcaggaagctcagcgatgttaaaaatgatggcgcgcaaatatgacagagaacgctatctggagcttgtcggaaaaattaaagcggcgatgccgaacgcttcactgacgaccgatattattgtcggttttccgaatgaaaccgatgaacaatttgaagaaacgctttcgttatatcgcgaagtggaatttgacagcgcatatacgtttatttactctcctcgtgaaggcacgccggcagcgaagatgaaagacaatgttccgatgagggtcaagaaagaacgtcttcagcgcctcaatgatttggtgaaagaaatttcagccaaaaaaatgaaggaatatgaaggcaggactgtcgaagtattagttgagggagaaagcaaaaataaccctgacattcttgccggctatacggaaaaaagcaagctcgtcaacttcaaagggccgaaagacgccatcggcaagattgtacgcgtcaaaatcgaacaggcgaaaacatggtcgcttgacggtgtgatggcaggagaagcaatcgaggtgaaataataatgacgctttactcaaagaaagacattgtacagcaggctaggaaccttgcgaaaatgatttctgaaacagaagaagttgattttttcaaacgcgccgaggcgcagattaacgaaaatgaaaaagtctctgcgattattaatcagattaaaaccctgcaaaagcaagccgttaacctgaagcactacgaaaagcttgaagcgctgaaacaagtggaaagtaaaattgacgccctgcaggaagaacttgaagggattccgatcattcaggaattcagagattcccagattgaggtcaatgaccttcttcagcttgtcgcacatacgatctcaaatcaggtgacaaacgaaatcattacatctaccggaggcaacctgctgacgggagaaaccggttcaaaagtaaaacattcgaataacagctgttctatttaaacacggggccttcatcggcccgtgtttttttgctggttgagaactaattgtaatatgtactaaagtttcattgactcaccgttttgtcccattttactggaaagttttatcatacttaaaggtaaagtttctgggcagggctgcatacaatgaaacagaaactttgtatttttatatttttattataaaaatgcacatgagacaaatgcccagcataagataacacgaagaagaacaaggaggcctgccggaatgtctgaatacagggaaattattacgaaagcggtagttgcgaaaggaagaaaattcacccaatgcaccaacacgatctcacctggagaaaaaccgtcaagtatattgggcggctggattatcaaccacaagtacgatgccgaaaagatcgggaagactgtagaaattgaagggtattatgatataaacgtctggtactcttacgccgataatacaaaaacggaagttgtaaccgagagagtaaagtatgtcgatgtgattaaactcagatacagagacacaaattacttagatgacgaacacgaagtcattgccaaagtgctgcagcaaccgaattgtcttgaagtcaccatttctcctaacggaaataaaatcgtggttcaggcagagagagaatttttagcagaagtggtcggtgaaacgaaagtcgtcgtcgaagtcaatcctgactgggaagaagacgatgatgatgattgggaagacgatcttgatgaagaattagaggacattaaccctgaatttttagtcggagatcctgaagaataagttgaggctaggggagtttaacaccccaagtctcttttttatatataaagatatcactcttttgtttatgttataatgggattcggataagagaagatacatagtgagggattaaatgatggctagttacacgcctatgatacagcaatacttgaagataaaggcagagcaccaagatgcctttttattttttcggcttggtgacttttatgaaatgttttttgaagatgcaaaaaaagcgtcacaagagcttgaaattacactgacaagcagagacggaggttcggctgataaaattccgatgtgcggcgtgccgtatcattccgcggcggcttatattgaacagctgattaaaaagggctataaagtggcgatctgtgagcagacggaagatccgaaggcggctaaaggcgttgttaaaagagaagtcgtccagctgatcacaccgggaaccgtgatggatggaaaaggcattcatgaatcggaaaacaactttatcgcttccgtttccgaattccgtgacggatacggtctcgctttatcggacttaacgactggagaaaacctggccgtatttattgagcggattgaagatgtcatgtcagaaatttactcagtcggcgcaaaggaaattgtcgtatcgagcaagtttaacgaacatacagctgctcagctgaaagaacggtgcggcgccacgatttctatcgaagacggggaaataacagaacgcattgaaatcgcaaagcacttgccgggcgaagagctgacagagacgtttatgcgtttatatacgtatttgcagaaaacgcaaaaacggagcctggatcatctgcagccggttcaagtatatgaattggaagaagcgatgaaaattgacctgtattcaaaacggaatcttgagctgacggaaacgatccgttcgaaaagcaaaaaagggtcattgctttggcttttagacgagacgaaaacagcgatgggcggccggcttctcaaacaatggattgaccgcccgctgatcagggcatcccaaatcgaagaacgccaggaaatggtcgagacgctgatcaatcatctgtttgagcgtgaagatctgcgagagcgcctgaaggaagtatacgatttagaacgtctggcgggccgggtcgcattcggaaacgtcaacgcaagggatttaatccagctgaaagaatctttaaaacaagtgccgagcatcaaagagcttgtagggtctcttaaccataaaaaagcaaaagaacgcgccggcttgattgatccgtgcggagatttgcttgacctgttagaagaagcccttcatgaaaacccgccgttatcgttaaaagaaggcaatttaattaaagacggctatcatcagaagctcgatgagtaccgtgacgccagcaaaaacggtaaagactggattgccagactggagcagcaggaacgcgcttatacgggcatccgttcattaaaggtcggtttcaataaagtgttcggctattatattgaagtcacaaaagcaaaccttcatctgcttgaagacggacggtatgagcggaaacagaccctcacaaacgccgaacggtacattacgccggaattgaaggaaaaagaagcgcttattttagaagcggaaaacaacatctgcgagctggaatatgagctttttgccggactgcgtgaaaaggtgaaacaatttattccgcgcttgcagcgtcttgccaaacaaatgagtgagctggacgcactgcaatgctttgctacgatcagtgaaaacaggcattacacaaagcctgtcttttctgataatgaagtaaaagtcattgaagggagacaccccgtcgttgaaaaggtgatggacagtcaagaatacgtcccgaacaactgcctgatgggcgattcgcgggaaatgctcctgattacgggtccgaatatgtcaggtaaaagcacgtatatgagacagatcgcacttctatcgatcatggctcagatcggctgttttgtgcccgcaaaagaagcggttctgccgatttttgatcaaatcttcacgagaatcggggcagcggatgatttgatttccggacaaagcacctttatggtggaaatgctggaagcgaaaaacgcgattgtgaacgccacaaaagacagcctgatcctgtttgatgaaatcggccgcgggacatcaacgtacgacggaatggcgctggcacaggcgattattgagtatgtccatgatcatatcggcgctaaaacactgttcagcacgcattatcatgagctgacggtgcttgaagataagcttcctcagctgaaaaacgttcatgtgcgcgcagaggaatataacggaacggtcgtgtttctccatcaaatcaaagaaggagccgcagataaaagttacggcattcatgtcgcccagcttgccgagctcccggatgatctgatcagccgcgcgcaggagattttgaaacagcttgagcagacgggagataaaccggagcttccggcggtatctgagaaaaagcccgccgtcagagaagaaccggcacagctgtccttttttgctgacggtgaaaaagaacagaaggcaccggctgtttctaataaagaaaaacaagtgcttgaagcctttaagtcaatcaatattctcgatatgacgccgcttgaagcgatgaacgaaatgtacaagctgcaaaaaaaattaaaatagaaagaggtgacggacttggcaaaagtcatccagctgtcagatgaactctcgaataaaatagcggccggcgaggtggtcgaacggcctgcctcagtcgttaaagaattggtggaaaacgccatcgacgcaaacagcacagtcattgaaatcgacatagaggaagcggggctttcgtcgattcgggtgctcgataacggcgaagggatggaaaccgatgattgcaagcgggctttccgccgccacgcgaccagtaaaatcaaagatgaaaacgacctgttccgggtgagaacactcggtttccgcggagaagctttgccaagtatcgcgtctgtttctcatctggaaatcaaaacgagcatcggcgagggagcgggaacccatctcattcttcagggcgggaatatcatttctgagcagaaatcctccagcagaaaaggaacggagattatcgttaccaacctgtttttcaatacacccgccagattgaaatatatgaaaaccgtgcatacggagctcggcaatattacggatgttgtcaaccggatcgctcttgcgcatccggaagtatcgatccgtctccgccatcaggggaaaaatctgctgcagacaaacggtaacggggacgtgcgccatgtgctggccgcaatttacgggacggcggttgcgaaaaaaatgataccgctccatgtcagctcgcttgattttgaagtcaagggctacattgcgcttccggaaatcacgcgtgcatccagaaactacatgtcatctgtcattaacggaagatacattaagaatttcccgcttgtaaaagcggtgcatgagggctatcacacactactgccgatcggccgccatccgattacgtttatcgaaattacgatggacccgattttggtcgatgtcaatgtccatccctcgaagcttgaagtccgcctcagcaaagagacggagctgcatgagctgatccgtgacgggataaaggaagtgtttcaaaagcagcggcttattccgagcgcccagctcccgaaaaaatccgcgccggcaccggccaaaaacgaacagcaatttatgacattcgaggaaagcgcgcctgagcggaaacttcctgaaaaaacgccggagccgtcttactcaccaatgaagctgagttcggtcgtaaaagagcctgagccggtaataatagaagaagagatcctcccgaatgaagcggatcacgatgtgccgccggagatcggcatgcccgaaacggaagcgcctgtttccgatactccggaaccggaagctgtctctgaagaaatacgtgaagaaagagttccggtgatgtatccgatcggccaaatgcacgggacatatattttagcccaaaacgaaaacggcttgtatatcattgaccagcatgcggcccaagaacggattaaatacgaatatttccgggagaaagtcgggcaggtcgagcctgaagtgcaggatatgatcgtgccgctcacctttcattatgcggcaaatgaagcgctgatcattgaccagcatcagcatgagcttgaaagcgtcggagtatttttagaagcattcggcacgaacagctacatcgttcgctgccatccggcctggtttccaaaaggggaagaagctgaactgattgaagaaatcattcagcaggtgcttgacgccaaacagatcgatattaaaaaactgcgggaggaagcggccattatgatgagctgcaaaggctcaatcaaagcgaaccgccatttgcgaaacgatgaaatcaaagcgctcttggacgacctgcgccgaacgacagacccgttcacatgcccgcacggcaggccgattataattcaccacagtacgtatgagatggagaagatgtttaagcgtgtgatgtagcagggttctgtgtgggttgtacccttcgtgcccacattttgcccacggattttagctgtttaggtattcatcaaaccggttaatgctgaatatcttttcggccgcaaaaggatcaacaagcctatttcccggtcgatggcctttaaaattttaagggttgccgctgagcatgtcggtttggatgatataggcacgcacatgctgaggaaaacattcgggtaccatttttacaagcaaacaaaagatgttgccatgctgcaggagatttttaatcactcggaccagcggacaacccttcgatacattggaatcaatcaggatgccatgaacaacgccatgaagaaattcaagatataaacaggctcatctcataacaagatgagtcttttttctgcatatttttattgattcccttcaaaaagcaaacgtggaattcattttagggatatcgcttgaaaacaagggtggaaagggctgacggtacttcgggcagttgcacagtatataacatatgggtaactcatggattgtggggataaataggaaacttgtgtataatagtggaaaaaaaggggggagattgggcgaaattcagggtgttaaagatctgttagacaaagcgttgaagcacatgggtcaatatatgaaagttagggatgatttagaaaatgactttattcagctaatgggtgatacatcaaaaatagtaggttttctacgtggttcatctgaattaatgattagaaaaaaattcgagtcttttttgaaagggtttagcttagatgaagaaccaactgaagctcaattagaaaagctcattgagtttatagataacgaaactaaagcggagtttattgcggatgctttttcaaagattttgttggcgcgttctagtaaagcttgtatgatcatggggagtattttaaatgatattgtaaaaaacaaagacaatttatcccatgaacatctcacttgtataaacgcattaatgaatttttatgatatggacattgaaaattacaagtttctatgttcttatttggatagtcaagggctgaaaaaaaactggtttacgttaaattacgagttaaaacagacggaattggatatacaaagtgttttaattacattggaaaaatcaatttcaaatcaaataatacaaagaggtatgcaattagatatagatacaattgatacaagaaaagaagaatattatgtgataacaagcagcggcaaattattaggagcttatgtaaaccgtatttttggcacaaacttggcagaataacggcacgccattttgttttaaataaggtattatggtagtaagtaataaatcgaaaggcactcatccaatcgggcgggtgctttttctattgagggaggagagaactgtggcgaaggaaaaaccgtcaaaggatgctcttgtatggaataaagaactaggcgtttatattctcccaaaaagataaataatgctgagagcgccttccgagggaggtcgctttttatgttctcttgtaaactgcttccggtaaatcgttcgacaaatttcgtaaacggttccattgttccttccttttaccgataataaggtaggaggagattaagatgaaaagagatttggatttaatacgagaaatacttattactttagaaaatgatagtaatccagaatcttggaaagttattcaactcgaagagagagaccaaaaggttataagttatcatgtaaaattgttaacagaagcaggattaatagaaggaaaagatgctaatttaaatcctggattttggtggtatgcaaggtcattaacaaatcaaggccatgactttttagacacaattaaaaatgagacaacttattctaagattaaagaaaaaatggggaatcagttaaagacggctcctttaacagtagtctcgagtgtagccgtggaaatagcgaaagagtgggctcttagtaaacttggtttctgattgggtatttattctctgcaaaaactatttctagtaaatcgttcgacaaattctgcaaatggtttttttacaatccttcttatcagataataaatttaaaaggaggttgtaaacattgagtaaatacaatgaattcgaagatacagcgaaagaactggattctttagcactatcaggtttttatggtgaagatgttagtgagttaactgcaaaacgggatgaattggatacaaacgagtatctctatcggagtgtaaaactttggttagataataaaactctatatggaaaggataatgtaaaaagatttattggtattttcttaaacttttttggggaatcgactaaagttaatccacaagaaacaatagatatactgaatgttttcttttttggaactaaagataaccctggcctagagtcactttcatcttataatgaattttcgatcgtatttaccgaaacaaaaaataaattaattcgattcaaaaattctgatatgagttatgtggaaaaaaagaggcttgcctctgaccttctgaatgtatatgcaaaaggagtagagatgattggtaaaattttaacatattgcattgctatttatgaattaattcagaataaaaaatataacctttataaaattcataaaatgactctgcataaaaaaattgaagaaattgaatgccaccaacattttaaaagtatgacaagcataattaatagatttgttagaaattcagaagctcatttgagtatagcatataaacctgacttaaataaatacgcctataagaaaacaacaaacggaaagattgaaacagagtatataaatatggacgaagtaatacttcaattatttccttcggttggatggataacacaagcatttatgtattctattcatcttttaattttattccatgatgataaagcgaaatttaatgaattagtaaaagaaatagatcgattatagaagcattccttagagggtgcttttttatattctctgtaaactgcgtccggtaaatctaagggagaacaatcggcggttaacggcttgagtgcggggcagtttagaaagaatataccaagtgctttcccaagtgggagggcgcttttttaattgtcgaaagggagcgatgtaaatgaaattggaattagcaaatagaaccatctttgtgttacttaaagaagcacacgcgaaaggagaaatgattgttacgaacgcaaggcagagaaggctaggaaaaacaaaagcgttgatgttattcgcagaaataaaccaactgcctgtgatcgtctgtggaagacaaaaaagatattatcagaaaaaatacccaaacgttcatatattcgggcatgcagaagttacctacattgacggattgcctctaatgcttttatgtgatgagggagtaccaaaaagaactattgaagaattgaaaactaaatgtcatggagtatcggggtttctcaacgaatatcaagatgttaacgaatatgccacaactgtagcaggctttgatccagcggagatttaagtagcctgacagtcgagaaaattttcgaaacgcctttgctaaaaattgaacttgatgagattgactccgtgccgcgcattttctataagggcgaaaagattattgatcgcgttgcggttgattttgaatggcggacggaggaatcagataaaattggttcggcctatattcgtatcaagcatggcaaggagatcaacggaatgttgactgtcgatacaaaggaaattgcatttggtgaaagggcttatagatagggggtattcaatcatgaagaaagcattgaagccttgtaatgaacccggctgccccaacctgtcgcgagagggttactgtgaacagcacaggcgaaccaagccggcctatgatcaataccgggagtctgctgccaaacgggggtataacagcaagtggaggcaggcgcgcgctggctacctgtccaagcatccgttatgtgccgcctgcttgatgcagggcagaagaaccccggctacagttgtcgatcatatcgttccgcataaaggcgacaaaaaactattctgggactcgggtaactggcagtctctctgcgggccgtgccatagccggaagacagcaaaggaggtgagggaatgaccagatcgcgccaaccttatagatttgatactttaccaagcttttaatcaataaagacaaggtatttaagtaatgccggcaagcttacagtgatttagagggtgtatgtgcttcattttcctgttggtccgacgacgaaagttgcggagtacaatttgaaatcaaaaaggggccctctctttatgagaaccctaatccgatttatctccatctccaatttatttcgttatcttcttcatagattccgggcagggaaattcctactcttttttgctcatcatcaacaataaaccaattatcatcgtctaatagatcatcgtcaaacttctcaattgcagaggggttatcttcatccactacagctctaaagaagtccttgaagttttccatcttgtcattagggataatcttgccataagcccaaggcccttctactgcaatcccttcaattttacctaaacactcattttgatagtaaagaaacataagcgtcactccttagaaaacattttgaagtattcttttggtatctcacctttaacaaaatactcagtatctctatttgtccatttgagggctttatttttccaattgtctgtttgtctcgtatcgttttttataagtctctcaatttgtttagggttaaggatggcaactccttttagcttacctgagcgtattgcttttcgaagagaggatatgtccaattcaatagtatgatccccataaccttttgcaatctttttgttgactgtaaagctggtgtatggactatttgattttccgcctcttctatatcctcctaaaatatgttccgttacagttacctgacgacctttatacattccacttttgttagcaggtattaagtttccggtttcaggtgatatataagatttgccgatgccattttccctttttgcagcataggggaaattttctcctctaaacaggttagaaggttttcctgttcctgcatttgcttttaaaacttttcccgttccaatcatacctataggactgattgcagctaatgcttgatggaatccatttttctgtctctcatcagatactttattcccgaacatatcccggccagttactgcctcactgaatccattagccgacgcaagcccgtatagtcctttttccgaatgctgaagagcttggaaggtttttggagttttatatatttcgagcgctttatctgctttgtaaattgcttttccagttgaatagattgcttttccacctttaaagatacggccggcccagccgacaataggaacataaccagcggcagccattcctcctgctgcgactcgctgaccagcagtgagtttttcacctgtgacggggtcaactccatcagcggcccttttataatcataatatccagtaacctcacctgtaaaatcacatacaacgttccacgttttttcgtaccagggtctatttgcaagctcttcctgttccttggcgattctccgctcttcagcctgctgctttttgaacgaaagatattcggatgactgcttatgtaatcctgcttgcatctggtggatttcactttcctgatacgccttggcattatagttgagcggggtggcgtttttgcctttacctgtcgcatcctgtaatgcctgaaaatccgctataataaacgcctcattagcttctgacagcccatattcatttgaaaggttgttatccaactcaccaattttttgtattgtttctctttttgttttatcagaatcatctaatttttggtccgcgttatcggttgaaaagagatcgagcggcagtatatctgcgatttcatcaaggatacctttcatttcattacgctgctcttgcataatcgcttttgatttatcaagtgcgtttgtcaattcatgttcaaggaaagattcttccacataagaatctgaaaggccggcatcttcaatcatagcttctatgcttgtgagaaacgcaattttcatatcaattaattcaagccattcatctgtgacgccagcgtgatcttgaaataaagctttgatgttgtcggcgcctttgctcgaaaaatcactgtcacccaggtctgccataccttggaacgcatttttcaggttcgtcatttggctgcgcaattctttgtattcagttgcgcgttgtttggcggcagaaagcagggtggttgcttcaaagattttcatgatcatatcctttcgcgataatattttattcaaaattttaccatattgaaacccgcagtaaaatgaatttcgttaagaattctccgagaatttaagctctgatatagtttatccgaggttaatataatgagggaaatgtcaaaaggacttaccgagaagattacgagcaagtcgttttcttaaaaaggatacaaaaaatatatgagcaagatcagggggaaccaagatttaaacttgttttaatgtttcctccaatatttaaagggtcaaatgattaatcggaaagctacatgattatcatgggttatacgagtacctgctcttacaaattcacagggagatgggggaagaatttgaataaaattggaatttggagagttgacaatgtgcaagtcaaaggggactagtaattagccccccttacatttagttcttcctgcgtttttttctgtttttgattaaactgaaaaccactaagagaaccacaccgacagcaacaatataaaatgaaatttctgctgctgcggtattaatattcttaagaacaaggataagccctattaaaactataggaatgatgtaagttagaattcttatagcttttgggctcggttcagcgtttcttttattttccataattacctcccgtctaagcttaacacaggttaaatttgataatcaccaacaatagtcccgtttaaagggaaaacataaggggttaagtaatccgccaagcggcgtacgtgccgtttggtccagaagatgctttatctctagcataaaagaatactcaggagagaatgctccggctgttccaagttttggactgtattctggcaaaagaaagtgaagaaacaacatcttttgtgtgaattacgtcgtattttttctaattcgaattgtgtgttagtgccaactcataagcataacattgttattcggtgtaaggagctaaggtattctgatatattttggggaagccgccgtatggttttagtttagcttgaagaaaagaattgaaataagaatcaagattgagagtcatttaaagactgagtatcctctcaggctacttcgacaattcttttcaaaataaaaactcgatttgtttttctttctttttattcgaaaattataccttcttcattttctgaataaaatctcctaaagtattcatgtaaatgaatattcttatttccttatatattacgataacaaattttaaaaacttcggctggttcttttggttgatttgaacagttttttatctttaccggaaaatccatggaaaaacgtggtgtcatctggtaaagtggttacagtcggctgggcggcggcagcagtctgcccggatcttttaaatgggaatggtgacaatggatcatacatatgaagtgcatcaaatcaaaacttatcaccagatgtggtccaactattgctatattatcgcagaccgctcaaaaaaatctgcgatagcggtggacccgtcctgggaaatcgataaaataaccgataaactgcatgaattggatgttgatttatcagctattttattaacacattcgcattatgaccatgtaaacttggcggagccgcttcagcaaatctatcattctgatatatacatgtcgtcggcggaaatcgatttctatcaattccggtgcagaaacttaatagcgcttgaagacggccaaacctttgcggccggagggtttatcatcagaagtatactgaccccgggacatacggccgggggaatgtgctatttgctatctgatcatctttttaccggtgacaccgtgtttacagaagggtgtggtatatgtgaggacaggggcagctcagctgaagatatgtttcacagtatacagaggatcaaagcctccattccgccgcatgtgcgtgtgtatccggggcactccttcggggagaagccgggtcaaaaaatggagagtcttttgaaaaacaatatttactttcagattgaaaaaaaagaacattttgtgaatttccgcaacagaaaaaatcaaaaagggctgtttcattttaagtaatgtgtgatttagttctttctaactagcttttcttttgaggcaaagaagttttgaaatggaatggtagttattactagatttctggtgatgaatggctgagtaacgggagtttgcggaagagaacgccgggcaggccggatgggacattctgcttacgcctgttccgaaagccctgagcccgcctttcgacagggaaaaataggcattattcaggagttcgcataggataaattaacttgacatggtatttttgtgaagttactatcaacttgaacatgcttcttatctgaatccgagaaaggatggctgagaaaatgatcacatacttattccccggacaaggttctcaaaagcagggaatggggagctcattgtttgatgaatttaaagacttaacggagcaggctgatgaaacactcggatattccatgaaacggctttgtcttgagaatccgtattccaaccttcacaagacgcagttcacccagcctgctttatatgttgtaaacgcgttaagctatttgaaaaaaatccaagacaacgacataaagccggattatgtggccggccacagtttgggagaatataatgcgctgtttgcagcaggtgcgtttgattttattaccggcctgcagcttgtccgtaaaagaggcgaattaatgagtatggccactgacggaaaaatggccgctgttatggggttaactgcagctcaagtgtcagacgcccttcaaacgcacggattacatacgattgatattgccaatatgaattctcctcaccaagttgtcatatccggacgcaaagaagacattgaaagagccaaaagcgtattcgaaggattaaaagacgttacgatgtttcatccgttaaacgtaagcggcgcttttcactcgaggtatatgagtgaagcaaaacaagagttcgaaaaatttttacagtcatttcatttttctgctatatcaattcctgtcatttctaatgtgcatgccagaccttatgagcaagacggaatccactccgttctggccgatcagatcgaccattcagtgcgatggaacgacagcatccgctatctgctggacaaagggcggatggaatttgaagaagtcggcccgggccatgtgctgacaggacttattcaccgcatcaaaaaagaaactgaagcttcacccgccatgtagcggaacgcaagtcaaaattcttatctcacacaatagtgccagccatacagcatcacgaccacttcacctgcacacgacatcacgaaaaactcacaaatcaatattttgaaaaaataaagagcaaaaaggagaacaaatgaaccagccaattgttttcatgttttctggacagggttcccaatactatcaaatggggaaagagctgtttgcacataacgccgcttttcggcagaaaatgcttgacttggacgattttgcagtcagccgtttcggttactctgtccttaaagagatgtatcatacaggcaatcgtctgtctgatccatttgaccgccttcttttcagccatcctgccatttttatggctgagtacgcacttgcatatgctttggagcaaagaggcatacgtcccgattatgtgatcggagcaagcctcggagagtatgcagcggccgctgtgtcgggcgtgctgagcgccgaggatgctttagattgcgtgctggaacaggcccgaatcgttacggaaacttgccgtaacggcagcatgcttgcgatactgggtgatccggctttatatcaaaatgatccgctgctcggcgaacatagtgaattggcatctgtaaactatcattctcactttgtcatctcgggagagcgggaacatatcaaaaagatcatggacgatctgagagaaaagcagattcctcatcagctattgccggtatcttacgggtttcactcagcgctggttgatcaggcggaacagccgtacaagcgctttttagctcagaaatcaatacggactccgtttataccgtacatctccagtgcgaccggagaggctgagaccgatatacaagcggactttttctgggatatcgtaagaaagccgattcgattccgcgaagcgcttcaattcgcagacagccgccaaaaaggattgtatatcgatgccgggccttccggaacattggccgcatttgccaaacagattcttcccgcaggatcggctgaacgcatccgtgccattatgacgccgtttcataaagaacaaacacatttgcagcaaatagaagacagcattttatcaccgcccggaaggagactgtaagatgatcagctttgtttttccaggccaaggctcgcaaagaatagggatgggggaggacctgttcggccgctatcctgaattaaccgcaaaggccgatcacattctcggatattccattcaggagctgtgccgggacggagaacgtctcaatcagactcaattcactcagccggcgctctatgtcgtcaatgccctcagttatttgaaaaaaacagaagaaaccggcttgaaaccggattttaccgccggacacagtttgggcgaatataacgcgttatacgcttcgggcgcctttgattttgaagaaggcttacagctggtcaaaaaaaggggcgaactgatgagccgcgcaaaaggaggcggcatggcagcggtgatcggcctgactcatgagcaggtgacggatgttttaagagaaaatcacttggatatgattgatatcgccaacatgaacacaccgcagcaaattgtcatttccggatataaagaagatattgaaaaagcagcatccgtttttgaagccgtaaacggcgtaaaaatggttcaccgcttaaatgtcagcggcgcctttcattccagatacatgctggaagcgaaggaagagttttcacggtttattgaatctttccattttaagccgctgtccatcccggtcatttcaaatgtgacggcaagaccctatgagcagagagagctgaaagagacactcaccggacaaataacgggatcggtgaactggacagacagcatccgtttcttaatgggaagaaagaacatgagctttgaggaaatcggtcccggaaaagtgctgacggggctgatacaaagaattacggctgaagcggagccgataacagatgaaatcaaagtcccggctgaggctggaaaaagctcaattacggcggcgtctttaggaaatgaagagtttaagcgcgattatcaattgaaatacgcctacttggccggcggcatgtaccgcggaatttcttcgaaggaaatggttgtcaaactggctgaaaaaggaatgatgggctttttcggaacgggcggtttgaacatcgcgcacgttgaggacgccattttgtcaattcagcatgagcttcgtgacggcagttccttcggcataaatgttgtacataacatgaagcatacagattcagaagaaaaaatgattgatcttttactgaagcatgggattcagaacttggaagcatcagcgtttttaacggttactcccgctttagtaaggtttcgcgctaaggggttaaaacgcggtgccggcggacaaataatagcgcgtcagcggattatcgccaagctgtcccgtccggaagtagcggaagcgtttctcagcccggcgcctgatcacattctgcagaaacttacagccgaaaacaaaattaccgctgaagaagcaagtctgatgagagaaatacccgttgcgcatgacatctgcgtagaggctgattcaggcggccacactgacggcggagttgcttacagtctcatgccggcgatcatccgtttacgagatgacatgatgaaaaaataccgatacggcaaaaccgtccgcgtcggagccgcagggggaatcggaacgcccgaggctgccatggccgcatttatgctcggcgctgattttattgtgaccggatctattaaccaatgcaccgttgaggcagcgacgagcggcctcgtaaaggacctcctgcagcagatgaatgtacaggacacggcctacgcgccggccggcgatatgtttgaatcaggcagcaaggtgcaggtattaaagaaagggctgttctttccgacccgcgcctctaagctgcatgaactgtatcagcgtcaccgctcaattgaagaaattgatgaaaagacactcagacaaatagaagagaagtattttaaggcaagtgtaagcagtatttatgacaaagtgaaggctcattattcgaatgaagacatttcaaaagccgaacggaatccgaaacagaaaatggcgctcatattcaaatggtatttcaggcaaagctctgcttcggcgattaaaggagacccggatgccaaggtagacttccagattcattgcggcccggcattaggcgcctttaatcaatgggtgaaaggtacggagctggagtcctggaaaaaccgccatgccgatggtatcggcctgcggcttatggaagagacggcctcgcttttgaatcagaagttaggttcatttttgcaaacgtgttgacaagacgaaatgatagattgaaaacatggaatattcataaaagatgaaacagggaggaactgacaatgagtaaagaaaaaatctttgaattgctgcagaacacaatctacgaggttttgcctgatttagaaggcgaacagctttcacaggaagaccggttagttgatctgggggcggattcagtggaccgcgccgaaattatcacgatgatgcttgaagaattatcactgcagatcccgcgtgttgagctgacgggagtgtcaaacatcggcgaattggcggcaaagctttatgaaaaggtacaggctgtctgataaaacggtgaaataatcggaaactcaaaattcatattggaggcgaagttcatggcggctgccggaatagaagcgataaatgtgtttggcgggacagcataccttgatgtcatgcagctggcggagtacagaaacttagaccctgccagatttgagaatttactgatgaaagaaaaagcggtggcgcttccgtacgaagaccccgttacattcggcgttaacgcggcaaagccgattatcgaccgattgacagaggctgaaaaagacagaatcgagctgctgattacctgctcggagtccggcatcgacttcggaaaatcactcagtacatatattcatgattacttaggcctcaaccggaactgccgtttatttgaactgaaacaagcctgttattcaggaacggcgggtttgcagatggcgcttaactttattttgtcgcagacatcccccggagcgaaggcgcttgtcgtcgcgacggatatttcccggtttttaattgccgaaggcggtgatgcgttaagcgaggattggtcttacgccgaaccgagcgccggagcgggtgccgtcgccttattgatcggtgaaaatccaatcgtatttcaggcggatgcgggcgctaacggctactacggctatgaggtgatggatacatgccgtccgatcccggacagtgaagccggtgacgccgatttgtcattgatgtcttacctcgattgctgtgaacagacatttcgcgagtacaaaaaccgtgtgccgggcgctgactacaaagagacgtttcactatcttgccttccatacaccgtttggcggcatggtcaaaggggcccaccggacgatgatgcgcaagcttgcaaaagcgaaaaacgctgaaatcgaacaggattttcaaaccagagtagagccggggctccgctactgccaaagagtcggaaacattatgggagcagcctctttactggctcttgcaagcacgattgaccaaggggcattcgacacttctaagcggatcggctgtttttcgtacggctccgggtgctgttcagaattttacagcggcgttgtgaagcctgaaggacaaacgcggcagcattctttcaaaatagaagagcatctgaacaacagatacaggctgtccatggaagagtatgaagaactgtttaaaggcagcggtctggtgaagttcggaacccggaatgtcaaattggatatgaatatgattccgaacattttagaccatcatgccgggagccctcgtttatatttggaagaaatcacggaatttcatcggaaatacaggtggatatcgtgacctatgaaacgataaacgtccgttttcagcaaaatgtctgcttcatcacctttgatcggcctgaagccaacaatacgattaatgagcgtttagtggaggaatgcctgcatgttctttctgaatgtgaagactccgtgacctccgtagtgcttgaagggcagccggaggtattttgtttcggggcggattttgatgagatgtaccggaaaatgaggcagggaatgcagcatgcggaatcgcaggagccgctttaccgtttgtggctggcattaaaatccgggccgtacattacaatcgcccgcgtccgcggacaagtaaatgcgggaggtgtcggttttgctgccgcgtgcgatatcgtcattgcagaggagagtgcttcgttcagtttatctgaactgttattcggactttatccagcctgcgttctgccgtttttaattcaaagaatcggatttcaaaaggcgcattatatgacgatcatgacaaagcccgtgccggcacgccaggcgcttgaatggggactttgtgacgtatgcgtcccggactcagcaacagagctgagaaagcatttgctgcgcctccgcccgctgtcgaaaaaagcagtcatccgctataaaaaatacatggattctttaaacgaccttgttcatcgttcgaaatccattgctttagccgaaaatcaagcgatgttttcagatccggataaccaatcagccatcacccgttatgcagaaacggggcggcttccttgggaaacggagaacagttaggaggatatcatgccgaacgccgcagttgaactgctcgaaattgaaccggatattatccaagtgacaatgcaggataaagcccataaaaacgctttctccaaagaactgacggatggattgatggaagcattcacccgtataaaaaaatcgtcagtctataaagctgtgatcttaacaggatacggccattactttgcttccggaggcacacaggaaggcctgctcaggattcagcagggcatcacgaggtttacggaagaccgcatgtactctttggcgctggaatgtgatatccccgtcatttccgccatgcagggccacggaatcggaggcgggtttgtcatggggcttttcagtgattttgtcattttaagcaaagaaagcgtgtataccgcaaactttatgaaatacggtttcacccccggaatgggcgctacctttatcgttccggagaagcttggggcaagcctcggccatgaaatgctgttaaacggcggccactaccgcggcggtgacctggagaaaagaggggtgccttttccggtgcttcctcggcaggaagtactagactatgcgcaggaattggcccgtgagcttgcggaaaaaccgagaaactctttaattacattgaaaaggcacttggtgacgccgtttcgcgagcagcttccggccgtcattgagaaggagttaatcatgcacgatgagacgtttcatgatgatgaagtgaaaaaacgaatcacgacgatgtacggagtataagacatacatcttacatacagatgaaatggaggcagctctatgaaatgtgatatgaaggcaagcgggttactcaagccatctgtcagctatggaaaatcattgcggctttcagcggatcagccgatgacgattcctgaagtcctgcacaaaaccgccgcggcagcgggagatcaaaagggcatcacatatatacagcctgacggcaccaaagtgtaccagacttacagcggcctgaaaaagatcgctctttcgattgtgaaagggctccgccaatcaggagtgaaggctcaggatgaagtcatattacagctcagtgacaattcccagttgattcctgctttttggggctgtgtttttttaggagcgatcccggttccgcttgcggccgctccggcttatacagaaatgaacagcgggacgcaaaaactgaaagacgcctggacgcttttgaatcagccgtatgtcatcacaagccgtgacgtgctgccggagatgactgaatgggcggaggagcaggagctttccgggttttgcgctttggcggcagaagatctcagtgcgcatgaaatggatacggactgtcatcatccccgtccggaagatttggcgatgctgcttttgacctcgggaagcacaggcacgccgaaagccgtgatgctcagccatgaaaacatcgtctgcatggtcaaaggaaatattcagatgcagggctatacaagtgaggatgtcacgtttaactggatgccttttgaccatgtcggcggcatcggaatgcttcatctgcgtgatgtttatctcggatgtgaggaaatcaacataccgagcgaatccattttgatggaccctttaaaatggctcgacctgattgatcattaccgcgcttcggtcacgtgggccccaaattttgcctttgggctgcttgctgattttgcagaagagattcaaacgcggaaatgggacttatcttccatgcgttacatgctgaacggcggggaggccgcggttgcgaaagtcggacgcagaattatggagcttttagagccgcacggtctgccggctaatgccatccgtcccgcatggggaatgtccgaaacgtcttcgggcgttattttctcagatgagtttacactggaaaacacgagtgacgacgatcgtttcgtcgagatcggtctgccgatcccgggatttaatatgagaattacggatgaccgcaatcaagtggtggaagaaggagaaatcggccgcttccaagtgtcgggtctgactgtaacgagcggatattatgagcgtccggacttaaacgagggtgtctttacagaagacggctggtttgaaacgggagatctcggatttctgcgtgaaggccgcctgacgataacggggcgcacgaaagatgccatcattatcaacggtgtgaattattacagccatgccattgaatcagccgttgaggaattgccggaaattgaaacgtcatatacagcggcatgcgccgtccggccgaatcaaagcacgacagatgagctggcgattttctttgtgacatctgttccgttggatgagaaccgcatgacgaagcttcttcatcacattcaccagcacgtgacacagagaatcggcgttacccctgattatctgcttccggtcgcaaaagaagacattcctaagacggcgatcgggaaaatccagcgcactcagctgaaacattcatttgaacaagggcaatttgattcattacataataacagacaagaaggcggcaattcagacacggcttctgcagagaaagaaattgaacgggattttatccgttttctgaaagaggaactttccatcgcggatgagctcgttgatccaaatacaccgtttcaaagtcttggcgtcaattccatcaagatgatgaaactcgccagatcaattgaaaaaacgtatcacatccggctgacggcaagagagctgcacaaaaacccgacgattggcgctttagcggcttatactgctgaaaaagcggcaaacatgtcagcggaccatcatccccaaaaagccgaaccgccggcagaacgggagagacggcaaacggcgccagcgctttcagaagtccaaaaagggctgtggacattgcagaaaatgtcgcctgaaacgactgcataccatgtcccgctctgtttccgattcacatccggaatcgacaaagagaaactgaaacaggcgtttcagctcgtattaaagcagcatccgatgctcaaaagcgccgtgaatgaaacagacggcgggttttatttcatagaagcggcagatccttttgtattctcggaagaagatatttctgacgtcaatgaatcacaaatatccgctctgatacggaaaaaagtgaaagagccgtttgtcaaagaaagcggacctttactgcgcgtgcagctgctttcaaaatccgccgaggaacattatcttttgacggtcattcaccacatcgtgtttgacggcatttcatccattacatttattcacagtctgctggatcattatcaggcgctgctggagggaaaagaagagtttacagctgccgctcccggtattcatcccgatttcgcggcttgggaaaagcggtatttagcgggtgaagaaagcaaagctgcccgcgcttactggatgaaacagctcgagggcgatctgcctgaccttcagcttccgccgatgcgcacggacagcagtgttccggagtttacagaagatacactgacacgccgtcttcccgaacggctgctgaataatataacggcgtttgccgcatcccgttcgattcatttgtctaccgtcatgctgagctgttacatggtgcttttaagcaaatatacggataaggaagatattgtgacaggcatgcctgcaatggtcagatccgaagaacgttttgaccgagtggtcggccatttcctcaacatgcttcccatacggagcagagccggacgaaaagaaacatttgctgactttgttcaaaaggtgcaggatgccgttctggacggactggatcactccttttatccgtttccgaaaatggtgcgtgatgtgcatgcgaaaccccggcagaacggttcgcctgttttcagcaatgcctttttctatcagaactttctgcagcattcgagctatcaatcgatgcttgatgaatacaaggaattctcctgtgagtttgtaaaagacattcatcaagagggggaatatgatcttgtatttgaaatgtgggaagaagcatcaggcatggatcttacgattaaatacagcaccgaattattcgacgaagcaggggcggccagacttttcagccaatttgtacaggctgctgaagctttgacggcgaatccggatacgccgcttgagaacgtttctctcatgacaaaaagagaggagcacatgattcttaatacttggaatgagacaagccgtgaatatccggatgcctgcttccatgaattattcgaacgtcaggcggcagaaacgccggacgcttgtgcggtcgtgtatgaagagcaaaagctgacgtaccgtgagcttgatgaaaaaagcacgaagctggcgctctatttgcaggcgcacggtgcaggccctgatgatctcatcggcatttatacagaccgatcattgcatatggctgtcggccttctcggcattttaaaagccgggggagcgtatgtgccgcttgatccttcttatcccgctgacagattggaatatatgatcaccgacagcaggatttcaatgtgtctgacgacagctgatttagagcactccttgaactggggaggcgtgcagacaactgccattgaccgcgattggtctcgtattgaaagtacagccgcggaaagaacgtcgctgaagcggttagtgacacctgacgatctggcgtatgtcatttacacgtcgggcagcacgggcaaaccgaaaggcgtgatgattccgcaccgggcgctgaccaatttcttactctcgatggcgaatgaaccggggctttcgtccgaagacaaactgcttgccgtcacgacatattgctttgacatcgcggcactggagctttaccttcctttaatcaaaggagcggagtgcaacatctgtaagacagaagtcacaaaagacgcacggaagctgaaagagctgattcaagagtacaaaccgacgatcatgcaggcgacgccgtttacgtggaaaatgctctttcattccggatggtcaaatgaagaaaatgtgaaaatcctttgcggcggtgaggcccttagcgaacaattgaagcagcagtttctcgatacgaaaagcgaggcttggaatatgttcgggccgacagagacgacaatctggtccgcggtgcagcggataacggaaaatgagaacgcgcttacgatcggacgcccgatcgccaatacccgcgtgtatattatggattccggtctcaaccctgttttagaaggggtgccgggagaactttgtattgcgggagacggattggcaagagggtatttcaacaagcctgagctgacagataaagctttcgtcagccaccggctcgaactgggatcaaagctttataaaacaggtgatatggcgcgttttctccccggcggccgcattgaatacatgggacggatggatacccaagtcaaaatccgcggctaccggattgaacccggagatattgagagcaggctgaatgcccatccggccgtacaggaaagtgtagtggttgtgaacaatcactccggaaatgagaagctttgcgcgttttatatccggaaaaacggagagccgcttccgtctgcaaaggaattgcgcaatcatttgaaacaagcgctgccggcctatatgacgccagcttcgtttatccgtcttgaagagctgccgcttacgccgaacggaaaagtggatcgcaagcttcttgctgcccgcgatctgacggaaaagcagccggacacacaaacattttcatcatctcatatccagcaggcggtgctggcgatttggcaggatgtattgaaaagcaaagatatagagcttgatgaccgcttttttgatgcggggggagattcgcttcttgccgtgactgtcactgaccggatgacgcaggaactggattgtgaattcagtgtaacggagctgtttgaatacgcgacggtaaaagacatcagccggtatatcgctgaacaaaaaccgaaagaagcctttttggctcctgtaccgcaaaagaaagtgaatgcagaagaccgggaacatccggcgggagaatttcccgattattacgaggacagccttgcggttatcggtatatcctgtgagtttccgggagcgaaagatcattatgaattttggaataacatcaaagaaggcaaagaaagcatcaccttcttttcaaaagaagagctccgccgattcggtatttctgaagaactggctgatcatcccggcttcgttccggctaaatcagttttagaggggaaagaaatgtttgatcccggtttcttcggcttttcaccgaaagatgcgggatatatggaccctcagctgagaatgcttttgctccattcatggaaggcaatcgaggatgcggggtatatctccaaagaaattccggaaacaagcgtgtatatgtctgccagcacgaactcttaccgcagcctgctgccggaggagacgacagcacagctggaaacgccggatggctacgtgtcatgggtgcttgcccaaagcggtacgattccgacgatgatttctcataaactcgggttgaaagggccgagctattttgtccatgccaactgctcatcttcgttaatcggcctgcattcggcttttcaaagcctgcagtccggcgaagccaagtacgcccttgtcggcggtgcgacccttcatacggaatcaagcgccggatatgttcatcagccggggctgaatttttcaagcgacgggcatattaaagcgtttgacgcggatgctgacggaatgatcggcggtgaaggggccggcgccgtgctcttgaaaaaagcgtcggatgccgttaaggacggcgaccatatttatgcgctgctgcgcggaatcggcgtcaataacgacggagcggataaggtcggattttatgcgccgagcgtcaaaggacaggctgaggtcattcagaaggtcattgatcagacgggcatacatcccgaaacgatcgcgtacgtcgaagctcacggcacaggaacaaaactcggcgatccgatcgaactgtccgcacttcaatcggtgtacggccgatatacagataaaaaacaatactgcggcatcggttcagtcaaaacaaatctcgggcatttggatacagcggccggaatggcgggctgcatcaaggttgtcatgagcttatatcatcaggaaatcgcgccgagcatcaattacaaagagccgaatccgaatcttcatttagaagactctccgttttacgtagcggaagaaaagaaagagttaacccgtgagaacagagcgcaccgcatggctttaagctctttcggtcttggcgggacaaacacacacgcgatttttgaacaatatccggatgcatctgaagcagcagacgctgccggtccgttcatcattccgttgtctgccagaaaaaaagatcgtctgaaggagtacgcaaaacagctgctggcttttctggaaagaaaaacggacgccgacctcgctgatcttgcctacacgttccaagtcggaagggaagcgatggaagagcgcgcggcctttatcacaagcggcactgcggagctgaagcggcagcttgccgattttatcaatgataagccggcagtaacaggctgcttcagaggagaaaaacagcaggcgaaagatattgcctggctttctgatgatgatgacagcgctgaactcattgagaaatggcttgcgaaaggaaaaggaccgaagctctgtgaaatgtggagtaaaggcgtcgccattaattggcacaagctttacaaagacaagcatccgaaacgaatcagcgtgccggtctacccgtttgcaaaggagccgtactggccgaaaaaagcagaaaagaacacatctgccgcacacaccggagtctcagttttacacccgctcgtgcagcaaaatacgtcagatttggccgttcagcggttcagctcacggtttacaggctcagaatttttcctgaaggatcatgtggtcagggaaaaagcggtgctgccgggagcggcatatttggaaatgtcttatgaagcggtaaaacgggcgcttggcggcttattaaaagaccaagacagaataacgctccatcataccgtctggatgaagccgatcgtcgttcacgaacaagagcgccaggtccatattgcgctgttccctgaagaggacggcatcatctcatatgacatttacagcgtaaacgctgacggcgaagaagtgctgcacagccaaggacgggccgaaatcattaaggctgaacaagagcctgagagagacctttctgccatacaaaacagatgcacagcggacattcttgatccggcggccttttatcgggaaggccggagcagggggatgttccacggaaaagccttccaaggcattaagtccgcctttatcggcgagaaagaagtgctctcggacatacagcttccggattctgtttcttacacgaacggacaatttacgcttcatccgagcatcattgattcggctattcagacggcgacgatctgcattatgcaggagttttccggacaaaagctgattctgccgtttgcgctggaatatcttgaagtcatcaaagcatgcacgccgactatgcgggcgcatgcacgcttcagcgaaggatatcaaaccggtgattccgtgcagaaagccgacattgacctgttcgacgaaacaggagcgctttgcgtgaaggtgagaggattctctacgagagtgcttgaaggcgatgcagaatcggctcagcggctatcaggctcggaaaaggtcttgtttgcaccggtctggaaagaagccgccgcatccgagaaagctgctgtccgtgctgatgagcatttgatcatactttgcgaagatgcctgccgtataaaagatgaagcggcatccggcctgaaagacgccgaactgctgattgcagaaggtgagggtgaaacagccgctgaatgcttccaaagctacgcgcagacaatcgccgaacacatccggctgatcatcagcgaaaaaaggcagggccgcattctgattcagaccgttatctcagcagacggcagccagcaattgtttgcggggttaacaggtttgttaaaaacagccgagctggaatacggaaaacttgactgtcagctcatcgaaatggaatcaatcggcgaaatgccggctgtcgctcaaaaactgaaaaacgacagtcatcggccgcatgataaacatatccgttataaaggagaaaaacggtatgtgaaggcttgggaagaaatgcatcccgcagggggcggcatcgtctggaaggacgaaggtgtatatctgattaccggaggcgcaggaagcctgggcttgatgttcgcaaaagaaatcgcaggtcgcgtaaaacacccgaaaatcattctgacgggccgctcaaatctggcagaagccaaacagcgtgagcttgctatgcttcagcactcaggcgcaaatgtcgtctacaaaaagctgaatgcggcggaccggcgggaaaacgaagcgctgatcaaagagattacggcggaattcggaaagcttaacggaattattcacgctgcgggagtgatacaagaccgcttcctgctgcaaaaaacgaaggaagagttcaggaaagtgcttgatccgaaagtcaacggaaccgcttatttagatgaagccagcaaagactgcaatcttgactttttcgtattgttctccagtgtttccggcgttctcggcaacgtcgggcaggctgattatgccgccggcaacgcgtttatggatgcatacgccgcttacaggcaatcccttacggagaatggccttcggcacggaaaaacggtcgcctttaactggacgctgtggaaagatggcggtatgcaggcgggagacgagacggagagaatgatgaaaaaagctttcggcatggttccgcttcaaaaggcgtcaggcctggctgcattttatgaaggaatggctcaggaaaagccgcagcttttagcagctgaaggacaagctgcaaaattaaaacagtcgttcctatccgtttctgaaactgaaaagccgcaggtggagaaaatagagcctgtatccgccgtttcgggagacaaatggcacggtgcgcttatccgaatggtcagttcaattttaaaagtcggccaagacgagattgatattgatacggaactgagtgaatacggttttgattccgtatcgtttaccgtctttacgaatcaattaaatgaagcgtatcagctggagctggcgccgacgatcttcttcgaacacgggacgatccgcagtttagcagagtatttgacggatgaggcagaagccggccttccttctcagccggaagaaaaacacgatgcagaagaatctcttcaaacgcttcacaccgagttgacagccatggtaagcggcattttaaaagttgaccgtgaagacatagatacagatacggaattgagtgaatacggttttgattccgtatcctttaccgtctttacgaatcaattaaatgaagcgtatcagctggagctggcgccgacgattttctttgagtacggaacgatcagcggtctcgccggatatttggcaaaagagcatccgggccgtttcggcgaaaagaagaaagagtctccgaaaaaagagcagccaaaagcccaaaaaccgaaaatgcagcggaaaaagcgcttcgcaacggtaatgaacgctgcggcagcgacacaagagccgcgccgcttggacccggttgccattgtcggaatcagcggccgattcccgggcgcgaaggatatagaggaattttggcgcaatttgaaagaaggaaaggattcgatcacaaccattccgaaagaacgctgggattggcaagcgtttgatggcgacccgaatcttgaagggaacaaaacgaatatcaagtggggcggctttatcgacggaatagctgaatttgatccgctgttctttgggatttcaccgcgggaagcccaatatttagatccgcagcagcggctgttattgacttatgcatggcgggcgatagaagatgcgggctgtaagccggaaagcctttccggcacaaatacgggcgtctttatcggcaccggaaataccggttataaagatttgttcacaagggcaggtcttgcgccggaaggacatgcggcgacaggcagcatgattccttccattggtccgaaccgtttgagctatttgttaaatcttcacgggccgagcgagccgattgaaacggcatgctcaagctcgcttgtggcgattcaccgggcggtatccgctatagaaaacggagaatgcgacatggcgattgccgggggaatcaatacgattctgacggaagaagcgcatatcagctacagcaaagcaggcatgctcagcaaagacggaaaatgcaaaaccttctccaaagatgccaacgggtatgtcagaggagaaggcgcgggaattctgatgctgaagaaactgacagatgcagaacgtgacggcaatccgatttacggcgtgatccgcggtacggctgaaaaccacggcggccgggcgaatacgctaacctcgccgaatccgaacctgcaggctgatttattagtgaaagcataccggaaagcgggagtggacccgagcaccgttacgtatattgaagcgcacggtacaggaacggaattgggcgacccgattgaaataaacggtctgaaagcggcgtttcacgagctggcgaaaacaaatcaagagcctgaagtctccggtcaccgctgcggcatcggttcggtcaaaagcaatatcggccatttagagcttgccgcgggagtatcaggcgtcatgaaagtgcttttgcaaatgaagcacaaaacgctggtgaaaagcctgcattgcgaaacgatcaatccgtacattcagcttgatgacagtcctttctacatcgtgcgggaaaatcaggaatggacggcagcaaaagatagaaacggaaatgccattccgcgccgggccggggtcagctcatttggcatcggcggggtcaacgcccatatcgtcattgaagagtatgtcccgaaagcagccgctcagcctgagcacagcccggaaaatccggcaatcatccttttgtccgccaaatcaaaagaaaaactgtttgaacaggcgcagcagctgcaaaaagcgatccgtcaaacgccgtatacagatcaagacttggcgggcgtcgcttatacgctgcaaaccggaagggacgaaatggaagagcgcttggccattcttgcagcgacgatggcggaattggaaacaaagctggaagcatttacgaaaaatgagaaaaacatcgccgggctgtacaccggccagtctcaccgcaataaagatacgtttgccttgttcacggccgatgaagatatggacatcgtcattgacgcctggattaaaaaaggcaaattcgccaagctggcagaggtatgggtgaaaggcggcgtattgaattggaaccggctgtatgaaaagggtacgccgcgtttactcagtcttccgtcttatccgttcgcaaaagacacgtattgggtgcctgagaatcctgacaaaaagagggtccatacagaggaacggatgaaacgtattctgacgaaacaatgggaactgagcccgctcgaactgggcgaaccgtgcgcacgttccgttgcgattttgacaggcggggacacgatcaatctcgcagaagagatcgcagcgcacatgccgaatcaccgtatcatcaccgcatcagaccttaccggtgaatatgactggcaggcgtttgacggagtcatcgacctcctcggcgcagcgaaagaagattctcaagacatggccggaatcaaatggcttcagcaattgattgagcatgggcataaagaagggatgacactgctttgtgtcacgaaagaccttgagtcattaaataaagaggccaatcaaacaacaggagcaaaacgggccggtctgtacagaatgctggcatgtgagtacggtcatctgtcttcaaggcatctcgaccttgaaggagcgctttctgatgacaaactggcgaagcagattgccgatgagtttcatgcccgtactgatgacgcggaagtttgccggagggacggcttgcgctaccgcgccgtattgagcggctcagaaaatatgaatatgcaaggcgagagaattgattttccggacaaccatgtgcttctgatcaccggagggacgagagggatcggtcttttatgcgcacgccattttgccgaacattacggagtgaaaaaactggtgcttacaggacgtgagacccttccgccgcgaagtgagtggacaggcggactgaatggggtgacggcttctgtaaaagcgaaaattgaagctgttctcgacttggaatccaaaggtgtacaagtgaaggtattgtcagtcccgttagctgatgaagccgggctgagacaggaactgagtcagataaaacagacgctcggacctatcggcggcgtgattcactgcgcgggtgtgaccgataaagagacgctcgcattcatcagaaaaaccgatgaagacatacagcgcgtgctcgagccgaaagtagacgggcttcaggcgttatacagtgtgctcagcgaagagccgctgaagtttttcgtcttgttctcttccgtgtcagctgcgataccggcgctttcggcaggacaggccgactatgccatggccaatgcgtatatggactattttgcaaactcatacaaagagcagctgccgatcgtaagcattcagtggccgaactggaaagaaaccggaatgggcgaagtaacgaacaaagcttataaagagagcgggctatacagcatcacgaatgcagaaggcttacagctccttgacggcatacttcttgaatcagcaaggggcccggtgctgccggccgttctgaatcctaagctgtggaagccggagcgattcctgcggcggagcaggcaggatcagccaatgagtccggctatggtaaaaccggcggaaaaaaccgctgatactgccgcagacaacgctcaattaacaaggaaaacagaagaatggctgaaagaattattttctgaagagctgcggattgaccaggatcagcttgagacagacgtagtattccaagattacggagtggactccattatccttgcccagcttctgcagcggatcaatcggaatctctcggcatcgcttgacccgtccattctgtatgaatatccgacgattcaatctttcgcaaattggcttctcgaaggatatacagaagttttgtcagaacgatttgatttggcggcggcggagcctgttctgaagaagccggctgagccggtaattgaaacacaagccgttaagatgcaagaagagccggacggaaaacagattcaccgggaagatatcgcggtcatcggcatgtcctgccggtttccgggggcggcttccttagaggcgtactggtcgcttttggctgaaggccgttcggctatccgtcctgttccggctgaacgatgggggtggaagacgccttattacgcgggaatgcttgacggaatcaatcaatttgatccggacttctttttactggcagaagaagatgtaaaggcaatggaccctcaagctttggccgctctggaagaatgccttaacctgtggtatcacgcgggctatacgccggatgagataaagggagaagcaataggtgtgtatctcggcggacgcagccgtcacagaccgggtgaagagaaactgctggacgcgaaaaacccgatcgtcgcgcttggccagaattatttggccgccaatctctctcaatactttgatatgcgcggcccgagcgttgtcctcgatacggcttgttcttctgctttagtcggaatgaatatggccgtgcaggctcttgtaacaggagaaataaaagcggccgtcgtcggcggcgtgagcctgtttgaatcagaagaaacccataaattatttgaacagcgcggcatattaagtaaagcgcagtcgttccatgtatttgacgaacgcgccgatggagtcgtgctgggcgagggtgtcggaatggttctattaaaaaccgtgtctcaggccattgaagacggagattctatttatgccgtagtgaaggcggtatccgtcaataatgacggaagaacggcaggcccggctacgccgagtctggaagcgcaaaaatccgtcatgaagacggctcttgaaaaaagcggaaaacagccggaagacattactcatattgaagcgaacggttcaggcacggtcgtgacggatctgttagaactgaaggccattcaatccgtctaccgttcaaaagacgccggcccgctcggaatcggatctgtgaaaccgaacatcgggcacccgctttgcgccgaaggaattgcaagtttcataaaagttgttctcatgctgaaagaaaagagctttatcccgtttttatcaggcgagcatgaaaatacacattttgatagagaaaaggccaatattcagttcagccgcactctggcagactggccgtcaccaataccggcggcaggaattaactgctttgccgacggcggaacaaacgcccacgtcattgtggaagcgtggcaggaagacgaagggcgccgaatcaagcgccatcctttaacaccgcctgcattaaataagcggctgatttcgccggacagcaaagaaggaacgaacgaaaaagctgcggcaaacatctgggatacctatgaagtggaggtttaacgtgaagaacttcaataagcaaatcactttatcgctgaaaaatccgtttattttacatcatgacgtttacggacaaaaagtccttccgggattggcttatattgatatgttttatcagattttcaaagagcgcggctattcatacgacgggcttcagctgcgccatttatccatatatcagccgcttattgcgaaagaagacagcgccgtcaagcttacggttgaatgtacaaaggtaaaagaagggcgctggaaacttaccgcaaaaggggctgaggtcagcggcggacgagtacagccggaagaacgtatttacgtcaaagcggaaatgcacgagacggcacccgcaattttcagtgacacgcttgatcttgactctgtcaaacgcgaggcggaacgcaccatcgatttaaatgagctgtatgcacaatgcagaagccaggaattggttcacagcggatatatgaaagcagaaggagaagtgtttgaggagcgggacggcgtcatctttgatgtatcgcttggaaaagacgcgatgggacaggccggggggtttttgttccatccgactcttcttgacggaagcggcgtcggcgcaaacctattgatctcatcgctgttaaatggggaaaagaggctgtttctgcctcttttctacgaatcgtttacagcttccgaacctttgcaggccggctgcatcacgagaatcaaacgttcgtcgcttcggcaggaaaaggagctcatttacattacactggagttttttaacgcatccggccggaaagtagccgagctgaaagatttcacaagcaagctcgtgcgggatgccgagctgatcaatacagaacgaaagactgctgagaagtctcctgaaaaagccggtttaccggaagttgcggcatcgcttgaaggcggacacccgcatgaggaagcagagcggtatgtcatgaatctgatggcggaaaaaatcggcaagccgcttgaacagattgattctcaagtcggctactatgaaatggggctgacatcgtccggactgcttgacgtcgtcgaaacgatcagcgaaaaaatcggcgaaaccctttctccgactttgctgtttgaatatacgacggcagcagagctggcagctttcctgactgagcagtacgggagccatttcagcgcgtctccggcaaagatggagaagccggttgagccgcaaacagaaaacaggcggaaaagcagtgtgccgctagatgaagatatcgcaattatcggcatggccggccgctatccgcaggccgaaaatattcatgaattctgggaaaacctgaaagaaggaaaaaactgtgtcaccgaaattccggagtctcgctgggactggcgccggtttgaaaatgtaaagtcgccttccggaaagagcatttcaaaatggggcggatttattgatgatcccgattgctttgatccccaatttttccggattacgccgcgggaagctgaaacaatggaccctcaggaacggctgtttttacaaacatgctgggaaacgattgaggatgccggatatacgccgaagtcgctcgcagaggcgcgcggacggaataagagacagcgcgtcggcgtcttcgcaggggtgatgcataaggattatacgttggtcggggctgaagcttcttctgaagatcatgtattcccgctttctcttaattatgcgcaaatcgcaaacagagtttcatatttttgcaattttcacgggccgagcatggcggtcgatacggtctgttcatcttcgctgactgcggttcaccttgctgcggaaagcattcggcgcggggaatgtgaatcggcggttgccggaggggtcaatttgtcgctgcatccgaataaatatctgacatacggtttatgggacatgttttcaacagacggggtttgtcatacattcgggaaagacggagacggctatgtaccggctgaaggaatcggtgccgttttattaaaaccgctgcgagaggcggtaaaagacggagaccggatttatgcggtgataaagggcagtgccgtcaaccacgtggggacagtgagcggaatttccgtgccgagtcctgtcgcgcaggccgatttgattgaagaatgcctggacaaagcgggcatcgatccgcgcacggtcagttatattgaggcgcacgggacgggaacttctctcggcgatccgatcgaggttcaaggccttgtcaaggcgttccgccagtacacacaggacaaacagttctgttcgatcggatcagtgaagtccaatatcggccatgcggaatcggctgcgggcatcagcggcttaagcaaggttgccctgcagcttcaccataaaactttggtgccgtctcttcattcggaggagctgaatccgtatttagattttgaacaatcaccgttttacgtccagcatcataccgaagcatggcagcagctatcagtgacggaaaacggaaacgaaaccgtatatccccggcgtgcgggcatcagctctttcggggcgacaggttcaaacgtgcatctcattctggaggaatttatccctgaagaatcacacggaacaaatgctgaaccggcagaagaacagacattcattttcccggtttcagcccggaatgaagaacggctaaaagagtacgttgcgaagctgtctgcatttattcatcccggcctgccgcttgaggatgcggcgtatacacttcagatcggccgtgaacagatggaggagcgggttgcgttcaccgctcaggatatgacacagctcaaagagcggctggaaggctttctggcgggtaaaacggtcagcgggtgctggcggaaccgagccgataaaagcaaacaggcagagcttgctccggacttgatacataaatggctttcttccgggagactggagatgattgccgaaaagtgggccggcggaggaacgatggattggaatctcttgtacggtgaaaacaaaccgaatcggatcagcctgccgacatatccgtttgaaaaaatccggtattgggtgccgaaggcggagaaaagagaatcgctgccgcaaaaaaatgcaggcatgctgcatccgctcctgcatgaaaatgtatcaaacatgtcaggcgtccgttttcggtcctcgtttagcggcggagaatttttcctgaaagatcacgtcgtcaaaaacgagcggacgttaccgggcgcggcttatctggaaatggtccgggcggccgtggaacatgcggcagaaacgaaggaagaaggaacagtccgtctgaaacatgtcgtatggatacgtccgtttacagcggcggatgagtccgcagaactgtacctccgtctttatgacgaagaaaatggagagatgggatttacggtttacagtgaatcggcttcctcggaagaagagcccgtactctatgcgcaaggaagcgcggcgtttgtccgagcgggcgaaccggccaaaatcgagattgacaaattaagagagtcacgccgtctgatcacacctgacgcttgctatcaggcatacaaacagatggggattgaatacggggatgctcacaaagcggtcacggaaatctatgcaaacgacagcaaagtgctcgcgaagctttcactcccgtcatctatttctcatacaaaagatcaatttgtcctccatccgagccttttggatgcggccttccacgcgacaatcgggttaatgcttgacagagacgggactgacataaggccgatgctgccatttgctctcgaacaggttgatgtgttgaaaagctgtaaaagcaatatgtgggtttccattgcgtacagcaacgaaagcaagcctgaagatgccgttcagaagctggatattgatgtatgtgacgaacaaggcaatgtatgtgtgaaaatgactggttattccgcacgggaaattgaaacggataaaacagatacactatattttgaacacgtatgggaagagaagaccgctgtacatgaagaggcgtcgatccatttcaaagcccgtcacgtgatgatatctgaccggtttacggatcaaatgaacagcatacagacagacttcagctgtcatgtgctccgtgatcagcataagagtgaagacgaacggtttgaagcttgtgcgcttcaggcgttcgaagaagtgaagaaaatcctcgcttcaaattccggcgggcgcgaactcattcagattgtcgtgcctcaagaagcggatacgcagctcctttgcggcttaacggggcttttgaaaacagcggcgcttgaaaacccgaacctgaccggccagctgattgaattggagccggacgtcaaggcagacattctgtcccgatatgtaagtgaatgcagcgctcatcctgatgacaagcatattcgctatgaaaacggcaggcgctatacggcacaatggcaggaaacgggtcttgaacagttcggcgccgaaaagccgtggaaggataaaggtgtttatctgatcacaggcggtgcgggcggactcggatttttattcgccagagaaatcgcccgacatgcaaaagacgccgttcttattttaacggggcgttctctgttggataaccgtaaaaaagcccagcttcaagaactgtccgatctcggcgcgcaagctgtgtacaaacaaacggacatgacggaaaaacaagaagttcaatcgctcacagcggacatctgtcggcagtacggcggcttaaacggtatcatacacagcgccggaacgataaaagacaactatattctgaaaaaacacaaagatgaaatccgtgatgtactggcgccgaaagtctccgggctggttcatcttgatgaagcggcaaaggacattgagcttgattttctgattcttttctcttccggagccggaagcgccggaagcgcgggccaggctgattatgcgatggccaatgcgtttatgaacgccttcagtgaaaaaagaaaccgtaaaaaagcccgaaatgaacgctatggacacaccctttcaatctgctggccgctttggaaagacggctgcatgacggttgatgctgaaacggaagccatgctgacaaaagaaagcggcatggtccctatgcaaacagaaaacggaattcaggctttataccgcgggtgggcggcaaacacatcccaagtcatggtgacggaaggctacgccgcaaaaatccggacgtttctgaaaaaatcagcggatgatcagccggataagggcagcgaaacggaagaaacggcaggtcttacagcaggcggagagaacatgcttgcagaaaaaacggagcatttcttgaaacaagtgctttcggaagtgaccaaacttcctgtcggcaaaattgacgccaaggcgcctatggaagattacggaattgattcgattatgattatgcatttgacgggccggctggaaaagagcttcggctcattatcaaaaacattgtttttcgagtaccagaatatcgaatcgctggcgcagtattttatgaaagcacaccgggacacgctgctggaagtgaccgggatgaaaacagaagaaacccctgcagccaaacctgcgctgtctgagaaagcgaaagtaaagcccgttttcaaacggaatgaaggcaaaaaaggctttgcgcaagtccgtccggaaacgcgggaaaatcagcagctaacagagcgtgaagatatcgcgattatcggtatatcaggacgatatccgcaggccgaaaatcttcaggaattttggaagaatttgagtgaaggcactgactgcataaccgaaattccaaacgatcgctgggatcacagtctttattacgacgctgataaagataaagaaggcaagacgtacggaaaatggggaggatttttgaaagacgtggacaaatttgatccgcaattcttctctatttcgccccgtgatgcaaaattgatggacccgcaggagcggttattcctgcaatgtgtctacgaaacgatggaagatgccggttacacgcgcaaaaagctcacggaaaaatcgggtgatttgcttggcgccaatgtcggtgtttacgtcggcgtcatgtacgaggaatatcagctttacggagccgaagaacaggcgcgcggaaaatcgcttgcgctgaccggaaatccgtcatcaattgcgaacagggcttcctatgtattcggttttaacggcccgagcatggctctggatacgatgtgctcttcttctttaacagccattcatctggcatgccaaagcttgcggaacggggaatgcgaggcagcatttgccgggggcgtcaatgtatccgttcatccgaataaatatttgatgctcggccagaacagatttttatcaagcaaaggcagatgtgaaagtttcggagaaggcggagacggttatgtgcccggtgaaggaatgggcgccgtactccttaagccgctttctaaagcaaaagcggacggtgatcatatttacggcctgatcaaaggaacggccgtgaaccatgatggaaaaacaaacgggtattccgtcccgaatccgaacgcccaagccgcggtgatcaaacaggcgttaaaagacgccggaaccgatccgagggcggtcagctacatcgaagcccacggcaccgggacttcactcggcgatccgattgaaatcacgggtctgacaaaagccttttcagaacaaacacaagataaacagttttgtgccatcggctcagcgaaatccaatatcgggcactgtgaaagcgcggcgggcatcgcgggtctgacgaaggtgctcctgcaaatgaaacataagcagctcgcaccgtcactgcattcccgaacgcttaacccgaatattgattttccgagtacgccgttcaaagtgcagcagacgcttgaagagtggaaaagaccggtcataaatgaaaacggagtaaataaagaattgccgagaaccgcggggctttcctcattcggagccggcggcgtcaacgctcatattgtcatcgaagaatattccgctgatgaggataaggagacggcttatgctgcgcctcatccgtcgatgatcgtcctttccgcgaaaaatgagaaacggcttcaaaaacgggcgaaacgtcttcttgatgcactgcggagcgggcgttaccgggaagcagatctgagccggatcgcatatacgcttcaaatcggccgtgaaccgatggaagagcgtctcggaatgattgtcagcaatttgcgcgagcttgaagagaagcttgacgaatttacgggcggcaagaagtcaattgaccagctctaccgcggacaagtcaaacagaataaagacacgatggcgctgtttgcggctgatgaggacatggaaaaaaccattgaggcgtggcttgaaaaaggcaaagccgcaaaggtattagagctttgggtgaagggccttccgctgaattgggataaactgtatcaaatgggcagaccgcaaaaaatcagtctcccggcctacccgtttgcaaaagaccgttattggatcgacatatcagcagatgcagctgttaaaagaccggccgaaacacagtctgcgccgatcgcaccggcggccgtcccggaaccggtcattgaagtaacaactcttcacgaggagactgtcaaagaaaaaccgtcaaacattacactgcagcctttgagcggcgcgaaaccgaaaagaaccgtacagtctgtttcccgtccggcggtttccgctgaaaaagtaagtgccgtattgaccgaaagtttggcagacgttttatatatggatgccgacgatatcgacgcagacgacacatttattgatatcggcatggattcaattacaggtcttgaatggataacgtctgttaataaagcatacggcacgtcccttacggtgacgaaagtatatgattatccgacaatccgccagtttgcggctttcttgcaaaaagagctcgggacagaaccgatccttgaggaagcaaccgaaccgcagaaatcagaggccgtgaaaaaaccgtcaaacatcatgctgcagcctttaaacgctcataagcagcatgtgacacaagcagaagcggatattctggaggcgatgtctgaaacggcagcttccgccgaaccggaagaaccgattgaagcggtgcatggcgagttatcaaaagcactggctgatgtattgtacatggagcggcatgaagtagatattgatgaggcctttattgacttgggtatggattcgattaccggtcttgaatggataaaggccgtcaataaacggtacggcacggactgtaacgtaacgaaagtgtatgattatccgacaatccgtcaatttgccgattttctgcgtacgcagccgtccgtccgcggcagaaaaaaacaggcggttcccgtacgtccaaagccgcttacgcagcaacatgccccgcaggagaaaacacctgccgagccggagagattaacggttcaaaaggaacctgaaccggtgcaggccaaacgggagcctaaagacgagataacggacgcgatagccatcgtcggcatgtcgggcaagtacccggatgcgccggacctaaagacgtattgggacaacttagcccgtgcgaaaaacgccattcgcgacatcccgctttcccgctgggatgtaaacaaatactatgatccggccttaaacaagaagggcaaagtatactgcagatcaatcggtatgcttgacggcattgaagagtttgatccgctgttctttaatatatctccgtctgaagcggaacttatggacccgcagcaccggatatttttacaggaaggttttaaagcctttgaagatgcgggttacagctcaaaagaattaaacgggaaaaattgcggcgtttatttggggattatgaacaatgaatacggcatgatgttaaacaaacatcagacaggaggaagcgcgacgggcaacagtttcagcatcgcggcggcccgcctgccttattatctcaatttgaaagggccggccattccgatcgatacggcatgctcttcatctctcgtcgggactcatttggcgcgtcaggcgctgttgaatcatgaaattgacatggcgcttgtcggcggtgtgaccttgtatttaacgcctgaatcatacatcagcatgtgtgaagcaggaatgctgtctcctgacggccaatgtaaagcatttgataacagtgcgaacggatttgtgcctggtgaaggcgcgggggcgctcgttttgaagaggctgaaagatgcggaagccgatcaagaccatatttacggagtcattatcggatctggaattaaccaggacggaaaaaccaacggcattaccgcaccaagcgcgaaaagccaaatggatttagagcgccaagtgtatgaagcgcacaacatccaccctgagagcatcacctatgcggaaatgcacggcaccggcacaaagcagggggatccgattgaattagaagccctgtcttctgtatttaaggaaaaaacggatcgcaaacaattttgcgccatcggttcggttaaatcgaatattgggcatacgtcggcggcggcaggtgtagcaagcgtccagaaggttctgctgtcgatgaagcatcagcagcttgtgccgaccctacatttcagcacgccgaatgaacattttgatttcgatgactcgcctttatttgtcaataccgaactcaaaccttgggaaacaggcggagcaccgcggcgggcctgtgtcagctcattcggctacagcggcacaaacgctcatctcgttatcgaggagtatcagccgaaagaccggggaagccgtaagcctgatgagacaaacatttttgtgctgtcggcgaaaaaagcgcctcaggtaaaaacctatgccgagtctgtgatcgaatttgcaaaagccaatcagaatatcaatctttcagatatggcatacacgcttcaaaccgggcgtgatgcgatggattaccgtcttacggttacagccggttcgagagaagaactgatcagccgtttaaccgattttgtaaacggaaatacgggtgaagggatatatgaagcccatatcaaaacggctaaaaaagaaatcaaagcatttgaaacggacgatgacctgaagcagtttgtgaggtcatggttcgataagaaaaaatacgccaaaatagcagaattgtgggccaaagggcttcagatggactgggacagactctatcaaggcgaaaaaccccgcagaatcagtctgccggcttatccgtttgcgaaggagccgtactggctgcctgagccgaaagtcataccgcaggaaacagaagaccggcgcgaggctgtgcttttagaaaagcaatgggttccgtgtgagatcgattcggccggtaagaaaagcggcaggacggtcatgattctggctgatggaagaacagcggagctagccgaagagactgcaaagcatttcgctgactcattcattctcccggtcgattcggctgacactgcagctagcgattggaatcacatagatggcgcaatcgatctgacgggatgcggagacgaagacccttcactggaagggatcagccggctccagactctgattgatacaagccgccggcaagcgcggccgctgacgctgctatatgtaacaaaaggcttggagccatttcagcagaaaacgattcatcttgcaggagcggcaaaaagcggcctgtacagaatgcttcaaaatgagtatcaaaacgtgacgtccagacacatggatgccgatacagatacggatcagcagacgcttgccaaacagattgcagatgaattttcggcggactgcacagaaccggaaatctgccgccgaaacggacagagataccgtgctttattcagggagattccaagcgggaagcgagcagaacataagcccgcaccgtttcctgaagaccatgtgcttttcattaccggaggcacgaggggactgggtctcttatgcgcccgccatttcacagaaaaacacggcgtgaaaaaagtagtgctgacaggcagggagccgattcctccccgtcataaacggtcagccgttaagacgaggctgaaagagaagatacgggcgattgaagagcttgaagcaaaaggagtgcaagtggcggtgatcagtctgaaattgtctgatcatgatgcggcggcagcggaaattgaaacgatccggcgcacgatgggaccgatcggcggcgtcattcactgtgcgggatcggttaattcagtaaatccggcgtttatcagaaagactgccggcgacatacaagaagtgctggaaccgaaagtcgccgggcttcaaacattaagcagccttttcacaaatgatcctttgcaattttttgtcttattttcttcagtatctgcagtcgttccggcgctcgcggcgggacagtcggattatgcgatggcaaatgcgtacatggattatttcgcggcggcttatcagcatcaatatccgctggtcagcattcaatggccgaactggaaggaaaccggattgggtgaagtccgcacagaaagcctgaagcagaccgggctgctgggactgtccaacgcggaaggacttgacttgctggaccgtattttatctgaaaacatccgcccgtccgttctgccggctatcgttgatcggatcgaatggcatcctgacaggctgctctgtcaagagaaaacacaaaaagccgtaataaacggcaaagccgctgaaaaacattcagacagagaactgcttcttgatacgaaggcgtggcttgtgaaactgttttccgatgagctgaaaatcgctacggaagaactggaaacagacgaaccgtttcaggattacggggttgattcgatcattttagcgcagcttttacagcaaatgaatcaagcgctcaaagaggacttagatccgtctgttttatatgaacatccgacgattgacgcgtttgccgaatggcttgtatccaatgggcagccgctgcttgcagaaagggaggagcatgatacagaaatcttggttccggctgccgtacaaacggttcacactgaacaaaagcgtgatgccgtaactgaagacattgccgtcgtcggaatgagctgccgttttccgggagcggaaacgttagaacaatattgggacttgctgagaagcggcaggtccgcaatcggctccgtcccggcggaacgtttcggatatgcaaatcaatacgttgcgggattgattgacaatatggatcactttgattccgaattctttttcattccggaaaacgacgcgaaagcgatggaccctcaggcattggcggtgttggaagagagcttgaaactttggtgccatgccggctattcccgtgaagaaatcaagggtatagaggccggtgtgtatatcggaggccgcagccagcatcagcctgatcctgaaattcttgcgaatacccgcaacccgatcgttgcgggcgggcagaattatttagcggcaaacgtttcgcaattttttgatctgcgcgggccgagcatcgtgcttgatacggcttgttcatcggctttgacaggaatgaacatggccgttcaggcactgagaagcggcgatatcaaagcggcggtagttggcggggtcagcctgctgaacacggatgcggcgcaccggatgttccaagagcgcgggctgttaaacgaaaaaccggcatttcacgtatttgacaagcgttcaggcggagttgtcctcggtgaaggcgtcggcatggtgctgttaaaaacagtaagccaggcgcaaaaagacggcgacacgatacacgcggtcattaaggccgccgccatgaacaatgacggcagaacggcaggcccgtcagctcctaatatgcaggcgcaaaaagatgtcatgcaaagcgcgcttttcaaaagcggcaaaaagccggaagacatcagttatatcgaagcaaacggatcgggttccgcggtgactgatttgcttgagctgaaggcgattcaatccgtataccgctcaggccagcatgttccgctcggcatcgggtcaatcaagccgaacatcgggcatccgctttgcgcagaaggcatcgcaagctttattaaagtcgtattaatgctgaagcataaacaaacggttccgttcctctcaggagatgaaccgatgccgcattttgatataacaaagacagattttcattttcataaaacagccggtgaatgggatgcagccagaccgtcagcagccatcaactgctttgccgacggcggaacgaacgcccacgtcattctggaagcttgggaagaaaaagataccggaatgaaaagaaagccgctgccggtaccgtcattaagacgtaaggctctggtaaaagaacctgacgcaccggcggagaaacaagagcttcctgcgaaaaaaatgttttggaaagcatttaaatgagagaggagtgggaaggaatgatatcggaaaaaatcaatatctcactggatcatcccatcatgaagggccatatggtctttggtgaagcggtattgcccggtcttgcttatatcgatttgatttatcaggtttttcaggaacacggttatgtatacaatgagctcgaattgaagcacgttacgatttatcagcctttaaccgtcagtgaaacggctgcaatcattctgaccattcaatgttctgatagcggagatggaaagtggctcatctccctttcagggcagaaacagcaaggtgacgagctgtcagacaatatacaatatgcgacggctgaaatggtgaaaagagacgctgtgacatttgacgaaaccattgatttcggcgatgtgaagcagtcaggcagatctctgaatcttgatgacatgtataaccgctgtctggatcatgacttggttcattccggcatgatgaaatcgaacggacgattgtacgaaacagaaggcggcatgctggctgagctttcttgcgaagaaggaaaagatttctttttattccatccggcccttttggatgcgagcggaatcggggcgagcggtttgctttctgaaacaaaccggcttcatctgcctttatattatgaatcgttcacggccgccgacaggctccaatcagagtgcacggcgcgtatcgccgcttccggcgtccgtcaggaaaaagaactcacaacgatgacgatcgagtacttcagccgatccggacaaaaggtggcggagctgaaaaacattacgggaaaagcggttcggctcgaagaagacgcgaatacagccgaacagaatcaacaggctgcaactgagccggaaagcgcagatgaaaaagacatcattctgtttttaaagaagcttttggctgataagcttgggcagccttgggagacgctggacgttcttgcaggatactacgagcttgggctggattcatcttctttgcttgagattgtacaggatatcagtaaaaagacgggtgcggacctcgcgcccactcttctctttgaatatacaaatataaaagaactcgcagcctttttgaaagagaccgtttcatttgaatgtgcggaacgtgcagccgaaccacaacggtctgaagctgaagcgccggacgcgccagaacatcataaaaacaccggagacatcgcgattatcggaatggccggccgctatccgaaagcgaaaagtgtggcggagttttgggaaaacctgaaggcaggcacggattgcatcactgaagttccgaagtcccgctgggattggagaacatatcaaaacgtaacgtccccttcaggaaaaacagtatcaaaatggggcggtttcattgacgatgccgactgcttcgatccgcagtttttcagaatctcaccgcgtgaggcggaaacgatggacccgcaggagcgcctgtttttagaaacatgctgggaaacgattgaagatgcggggtatacgcctgaaacgctgggaaataaaggggaaaaacagcatctgatcggcgtatttgcaggggtgatgcataaagattattccttaatcggcgcagaacaattatctgaaactgatccttttccggtttcactgaattatgcgcagattgccaacagagtttcctattattgtgacttccacgggccgagcatcgcggtggataccgtttgttcctcatcattgaccgccgttcatctggccattgaaagcatccgccgcggcgaatgtgaggccgcgcttgcgggaggggtgaacttgtcgctgcacccggcgaaatatctcagctacggaagcgtgggcatgcactcaagtgacggccgctgccgtacattcggagagggcggggacggctacgtttccggagaaggagtcggtgcggtcttgctcaagccgctggaaaaagccgaacaagacggcgaccgcatttacgcggtcattaaaggaagcgccgttaaccacgtcgggaaagtaagcggaattacagtcccgagtcctgctgcacaggcagaagtcattaaggcctgtctgaaaaaagcaggtatcagcccgcggaccgtcagttatgtggaagcccatggcacgggtacttcgttaggagacccgattgaaattgaaggtctgtcaaaagcgttcagccaagggacgcaggatcagcaattttgttccatcggttcggtcaaatcaaatatcggccacgcagaatcagcggcggggatcagcgggttaacaaaagcggcgctgcagcttcatcacaaaacgcttgtcaaatcactgcattctgcggaattaaatccttacctgaaatttgagggatctcctttttacgtacagcagcagactgctccgtggaagcagccggcagccgaagaaaacggtaaagtcacacattatccgcgcagggccgggctcagttccttcggtgcatccggttcgaatgcccatatcattttagaagaatacattcagcctgaacaaaaagcgcctgcacctgagaacgatgcagcaaaactcatcccgctgtcagcaagaaataaagacaggcttctcgcctatgcggaaaaattagtccggtcgctttcagaaaagacggtgctgtctgaactggcttatactcttcagacgggacgtgaagcaatggaggagagagctgtcttccttgtaaatgacacccgcgacttgaaagaaaagctgaatgatttcgtaaaaggaaacgaaaacatccccggtctttggcgcggacaagccgagctgccggaactgagcgaagccgctcccgagacggacgatccgaaacggcttgccgcgttatgggcagaagggaaaataatagattggaataagctgtacgcttcgggtaaaccgcgtaaaacaagcgttccgacttatccgtttgcaaaagaacgctattggattccgcagcagaaaaaacaggagaaaagcctgtcaggcctgcatccgcttttacaagaaaatacgtcagatttttcgcagcagcgcttcacgtctctttttactggagatgaatttttcctatctgaccatgtcgtcaacgggcaaaaaatactgccgggcgtcgcctatttggaaatggccagagaggcggtcaaaaaggccgctgccgtgacggaaaaaggccaaagcgtcacactcaggcaggttgtttgggtccggccggtcatggttgaagacaaaccgaaggaaatacatattgccctttacccagaagataatggtgagattacctatgaaatatacagtgaggcagaaaacggcgaagatccggttattcacagccagggtgaagcggtcattaccgaaccgggaagcgcccagattgatatcgagtctgtcaaaacttcctgcaatttaggaattgtgactgcggaagaatgttacggtgcttttgagaagatcggtctggattacggagaggcatacaggggcgtacagcaattgctgatcggagaagaccgattattggcccgtatttcactcccagcagccgtacatgacaaaaaagaacagtatacgcttcacccgagtatgatggacgccgcttttcacgcttccgtcggtctgcttgtccgctcaatacatgatgatgcagacagccacgagctttctttgccgtttgcgatgcaggaagtggaagtgttcgggccgtgtcctgaacatatctggtcatatatccggtacacagaaggcagcaaagcagatgacaacgtaagaaaatttgacattgatatgtgcgatgatgccggtacggtttatgtccggatgaaaggcgcgtccgtccgggcgcttgacacaagccaaacagcgggcggagaaacctcggaggcgcctgtcggccatacgatgctgattccggcttgggagcctgttgcgcttgaaaaagccggggaagcagcggcggataagcagacggcagtattcggcggaacggattcgagacatacgcgcataaaagaacatctgccgaacgcttcctattatccgatcagaggtacggatgatatcacatctcttacgcacatgcttgaaggacaaaaagaactggagcaaatcatttggcttgctccgcaggctgagagtgctgacagcctcaaggaacaggaaagaaacgttcttcatgtgttcaagctgatgaaagcattacttgccttagggtacggagaaaaacgtttggactggtgcatcgtcacagcaaatgcccagccgttttcggatcaagacagcgccgacccgtcacaagccgcagtcagcggacttgccggaacaatggcgaaagaatatccgcattggcatatccgcatggttgacacagaaacggacggcagctggccgatcgaagaggcgctcagtctttctgccgggaaaaacggtcaaatttgggcgtaccgcaatcagcagctgtttgagcggcagctgataccgcttgacaatatgccgaaaaacggcacgctgtaccaaacaggcggggtttatgccgtgatcggaggcgccgggtatcttggcgaggcatggagtgaatacatgatccgccgctacaaagcacgcatcatttggatcggaagaagcacactgaatgattccatacaggcgaaactcgaccggctcagcgcattcggcccggcgcctgaatatgtctccgccgatgccgccgacagtgcttccttagagagggcttatcagttcataaaagagcgccacacaaaaatgaacggaatcatccactcggcaatggatctgtctgagcaaagcttaaataatatgaagacagaagagttcaaatcggtgctgcgggcaaaagccgatgtaagtgtgtccatggcggaggtatttggacgggagccgcttgactttgcgctcttcttctcctcgcttgtggcatttatccataacgtgaaacaaagccattatgccgcgggatgcgctttcagtgacgcatttgcgaaggaacttgatcagacatggaattgtccggtcaaagtgatgaattggggctattggggcaacagcgaagcggctgaagacggggattttattcagctgatggatcagatcggattgggattgatcgaaccggacgctgcaatggaggcgcttgaaacccttatgacgctgccggttgatcaggcggctttcattcatacgacaaaaccggtcgcagtcgaagggatgaatgaaagagaaaagatttccgtttatccgcctcagccgcttgtcttttcacaacagccgaaggtcgctccgcccggcgcacgtcttgttagagaggctgaacatcaggagctcgatgattttctgtatcagctgttgatcgcccagcttaaagaagcagacttgctgacgccgcaaagccttaaagcgtatgagcccgaacatgaatactttaaaaaatggctcaatcaaacgatcgctttccttctggaacatggctatctggaagggaatgcggattcatataaactgtcggcgcgagccgaaaacacaaccgcctcgctatggcaaaaatgggagcgggaaaaagaggaatggctcaataacgccgatacaaaagcgatgactgttttagccgagacgatgcttaaagcactgccggacattctgcgcgaagacgtgccggcgacagatatcatgttcccgcactcttcaatggaacttgttgaaggaatttataagcacaatcaagtcgcggattactttaacagcgccctgtcagatacattaacggcttatgtgaaagaaaacatcagtaaacattcaaaagccgagatccgcatactggaaatcggagcgggcacaggcggcacaagcgcaggcatatttgaaaagcttaggccgtatcaaaaccatataaaagaatactgttacaccgatgtatcaaaagcttttctcgtgcatgcggagacggaatacggcaaacggaatccttatctgacgtataagctttttaacgcagaagcgccgcttgccggccaagacatagagccgggcgcatacgacatcgtcgttgcggccaatgtgctccacgcgacgaaagacatccgccagacgctgagaaatgccaaagccgttttaaaagacaacggtttgctgctcttaaatgaaatggcgggaaacagcctgttcccgcatattactttcggactgcttgaaggctggtggctgcatgaagattctgcccttcgtattccggggtgcccgggcttgtatccggaaagctggaagcgcgtgttagaaagtgaaggctggcattctgtcttcttcccggcagaagcggcacatgaattaagccatcagattatagcggcaaaaagcaacggcattgttcgccaaaaaacgtttaaagcagaggccggaaaacggaccgctccgccaaaagcagcacatgcgccggaacttcaggcgcaaacaacggtgcaaaaaggcgacacgtctttaacagaaaaaagcaccgagtacttgaaaacgttaatcggagaaacattaaaaattccgccggctcaaattgatccgaaagcgccgcttgaaaaatacggaattgattctatcgtcgtcgtacagctgacaaacgcgttacgaaatgtattggaccaagtcagcagcactttattttttgaatatcagacgattgaggcgctcgtcgctcacttaatcaaaacgaaaaaagacgcgatgattaaactgacgggacaaacgcctgttcaggaagaacggaaggcatcaccagaaccgcaggctgtacagccggctaagccgcttcgcactgactggcggcggagggaaaaacgggcagccaaagagaccgtccggcaaagttcggttcgcgacgtggccatcatcggtgtttcaggacgctacccgcaggcaaaaacagcggctgagctttgggctaatattaaaaaaggaaaaaactgcatagaagaaatcccgcgggaacgctggaactggcaggattactacgatgaagagaaaggtaaagaaggctctatttatacgaaatggggcggcttcattgaggatatggacaagtttgatccgctgttctttcagatttctcctttggaagcggagcgaatggacccgcaggagcgattatttttagaaacggcgtatgcgagtatcgaggatgccggctatacgcctgacaacctgtgccaaagcagaaaaatcggtgtttttgccggcgcgatgaacaaaaactacccgacaggctacggctattggtccattgccaacagggtatcttacctttttgatttccaagggccgagcattgccgttgatacagcctgctcttcttctttgacggccattcatctggcgcttgagagcatatacagcggttcaagcgaatgtgcgattgccgggggcgtaaacatagtgaccgacccgatccattatatgaatctgtcagtcatgaacatgctttccgcaggcgacacgtgcaaatcgttcggagaccgcgcggatggttttgtcgacggagaaggggtaggagcggtcgtattaaagccgttggaccgggcgattgccgacaacgatcacatttacggtgtgattaaaggaagcaccattaacagcggaggcaaaacgaacggatacaccgttccgaatccgaatgcgcaggccgccttaataaaagaagctttcgaaagggcaaacgtcccggcgcgcaccgtcagttatattgaagcccacggtacggggaccgcattaggagatccgattgaaatcgccggattaacgaaagcatttgaagaggatacaacagataaacagttttgcgccatcggctccgcaaaatcaaatatcggtcattgtgaaagcgccgcgggcattgcgggtctgacaaaaatactattccagctcaaagaccgccaaattgcgccgtccctgcacgcggaacagctgaatccgaatattgatttcgcgtatacgccgtttgccgttcagcaggagctcggtgagtggaaacgtcccgtcatcggcggcagagagcttccgagaagggcggggttaagcagcttcggcgcgggaggagcaaacgcccacctcgtcatagaagaatatacggcagacaaagagcctgatgagatgccggcagatcagcccgccatcatcgtcctgtccgcgaaaaacagcgaacggctcactgaaaaagcaaaacagctcagagacgccatccgtgaaaaaagatacagcggccgcgaccttatgagcatagcctttactcttcagacgggccgggtgccgatggaagagcgtctcggttttatcgtccattcacttcatgaacttgaggaaaaactgaatggatttatcgccggacaaaacagcgccggactgcaccgtgacggcacggaagaaaacaaacggatgcttgccgtattttcggcggatgatgatatggaaacaatcatagacgcttggatcagcaaacggaaatattctaagctgcttgagctttgggtaaaaggattggacatcgattgggcgaaattatacggagaccgtcctccggcccgcatcagcctgcctgcttatccgtttgcgaaagaacgcttctggcatcagcagcctgtacaaagcaaggccgcgcccgttaacgcgccgtctgatgaaagtgatccggcggaacagtttgaagtaatggcttttagagaagttcttaaagaacaggttctgccggctgccggagaaaagaaaatcaaaacggtgatttctttcttatctgatcagaagaagcagcaggaagccgtctctgtgatcaaatcgtatgacaatgacattgacgttatttttatcgctcagggagaccgacatgaggctctgtccgccggccgctgccaagtggtgcgggaagatccgcaatcatatgtgaacgcttttgcggatattcaaaaagagtacggtgaagcttctgccattttgtatttatgggcgcttgaagataaaagctgcatcgaagattattcatgtatcgtccatattctcaaagcaatggctgagaccggtctgcagccggaaaggctgttattggcgggggaatatgcatccggtctggaaaggtgctacttggaatcatggatcggctttgagcgttcgctcggcattgttctcccgaaaacaagtgttaccggccacttcagaaaagccggtgcggccataacggactggatgagaaccatttgggacgagctgaaagctgaaacataccaaaccgttttcttggaagagggaaaacgatatgtctatcacaccgaaccaaccggactaacgaaagaaaacagcaggatcagaaccggcggaacatatctcattacaggcggattaggagggctcggctgcttatttgcccgccatctcgcccggaactaccaggcaaatgtcattctcacggggcggtcgccgatcaatgaagaaaagaaagaaaaaatgaaagacctggaaaatctcggcgcgggtgttctttacgccgaagccgatgtttgtgatccgatcggaatgggcgactgcatcaagcgcgcgaaagaacgattcggagccattcacggcgtcattcatgcggcgggcatcgaaagcagaacatccgtctttgaaaatgaaatcgggaatttccgcagtacgcttgaaccgaaaataaacggaagcctgcttcttgacgagtggctgaaaaacgaaacgcctgatttcatctgctacttttcatccacatcggctgttttaggagatttcggctgctgtgattacgcggtcgcgaacaggttccaaatggcgtatgcccactataaaaacgaacaatcagaaagcggaaacgcttttgtcatcaactggccggtgtggaaaaacggcggaatggccgtcggcggtgaagagacgacgggcatgtacctgaaatcaagcggccagcgcctgttagaaacagatgaaggcattgagctgtttgagcgcatcatttctcaagacaacacccagtgccttgtcattgccggcgaaagaagccgtgccgaacgatttttaggcatacggcgggacgattcatcaaaaccggatgcgcttttggaaaccgtgagccgccgcatcccggaagaaagcgcagaaaaacggctcgaagcggatttgaaagagctgatacacagtctgctgaaaatatccaaagataaactcgtcctgcataaaaactgggcggaattcggatttgattccatctatttagccaaatttgccgctcttttgacgagtcattacggcattgaagtcactccggcgttattttacagctatgccacgctcggagacgtcatcagctattacctgatagaacataaagaaacgatcgaaacgttttaccgaacggaagaaaccgaaacagaagccgccgctccggataacaaggagtatacggatcaggagatcatcgccatgatgaaacaggtctctgaggggacattagattttaaaagagtgcaagacatcatagaagggagtaagacctatgaatcataaagaacttctcgatgcctacagatcaggaacgctcaccatcgctgaagtagaacaaaagcttcaggctttcaagcggacaactgcaaaacgtccgctttctgaaggccagaaaggtttgtggatgcttcagaaaatgtttccggagatgagcgcatataacattccgttatgctttcgttttcaaaagctggatatcgagacattcaaaaacgcccttttgtccgtgcagcgccagcaccctattttgaccagtgtgataaaagaggaaaacggccttccgtatcagatagaagatacggatcggcattttccgattgaagaaatggatctttctgaattaagcgggcgtgacgctctttcgtttattaaagaaaaagcaaaagaaccgttctcgcttgaaaccgggccgctcctgcgtgttcaagtattccggcgggcgaagcgggagccgattgtgttaatcaccattcaccatatcatttttgacggcgtctctcttatgacgtttatgtcggcgctgctggacgcttatgcaaaagcaagtgaaggcaaagaacctgtcatgcttcagcagtccgcagattatcatgactttgtgaaatgggaaaaagagctgctggaaagcgaagcgggaaaaacgcatctctcttattggaaaaagcagctggaaggaccgctgccggtgcttgagcttccgtcggattacccgagatcatcggttcaaacgtgcaaagggcaggcgtatcagcgcttgcttcctgatgaactgaaccggcagattaaagtttgcgccaaaaaacataatgtcaatgaatccgttgtgtatctcgctattttcaaaggactgctctatcaatatacgaatcaggaagatgtcatcgtcggcatgccgacgatggggcgttctgaggctcaatttgagtctgtcatcggctactttattaatatgatcgcggtcagaagcagggagacgggcgccaaatcttttacgtcgtttttgaaggagctgcagctgacactggcagaagggctggcccatgccgcgtatccgtttcccgcgcttgtaaaagaattgaagacggaacgctcgcctgcggtgtcgcctgtttttcaaaccgcgtttttctatcaaaacttcttccggacggaaggagcggaaaagctggcggaactatatcaatcactcggcattgaaatgatagaagacattcatcaggaaggcgaatttgagcttgcgcttgaagtctataaaaaagaaacgggaaccgtcctgcaatttctgtacaacccggatgtctacagcccttctttcatcgaacgaatggcggagcattatatgaaactggcagaaaaggtgctttctgatccggagatcgcttttgaagcctgttccggcctgctcaatcaaaaacgggatgaaagccgttcatcccatcagccaaatgagcgctgcattcatgaagtgtttgcggaaaaagccggacgccaccctgacagagaagccgtcacattcggtgaaaacagtcttacatatcgcgaattagatgaacgaagcacggcgctcgctgtgtacctgcaagaaaagggcgtcacaccggaatgcccggtcggcatttgtacggagcgttcttttgagatggtcatcggcatcctcgccattttaaaagcgggaggcgcgtatgtaccgctggacccggcttttccaaacgaacggatggcgcacgtgttgactgacagcggcgtgtcaatcgtattaacgcaggaaaagacgcgcggcatgattgaacagttggccatcggcggtgtaagcacggtggaaattgaaaacagcggacgttctgtcagcggggcaaaactgacgccgcgttcaaaaccgcatcatctcgcttatattctatatacgtccggaagcacgggaaaaccgaaaggcgtcatggttgagcacagagccatcatgaatacgctgcagtttttggaagctgagtatccggtcgcacaagaggatgcctatctgttaaaaacgaattacgtatttgacgtttcgatttctgaattattcggctggtttatcggaaacggacggcttgtcattttgccgcctggtgcagaaaaaaatccgcagctttgcatggaatatatccaaacccaccaggtcacgcatctgaattttgcgcccgccgtgtttaatgtatttctggaaacggtaaaccggcatacggcatttacagaagacggccctgtgaaatatgtgatggtggccggtgaggcgtttccgaaagatttagttaaaaagtcagtttccatcttcaaacatgccagaattgaaaatatatacggcccgacggaaacatccatttatgccgcttactacagctgcggccaaaaggaaatcacaagcaggaatacgccgatcgggaaaccgattcacaatacgcggctttatatcgttgatgaaaagctcagccccgtccctgacggtgtggccggggagctttgcgtggccggcgccggtctggccagaggctattacaatcagcctgagctgacggcggcatcatttattgataatccgtttagtgaaggagaaaaactttacaaaacaggtgatttggccagatggctgcctgacggaaatatagaatatgccggccggattgacagtcaggtgaaaattcgcggcttccgcatcgaattgggagcgattgaaacgaaattgagcgaacatccggatatccttgaccaggcggttgtggttcaggaaaagaacggacataaaaagctgattgcttattatacggcccgctccggtcatacggcagacgaaaaagcgctccgcaaccatcttttatcgagtctgccggattatatggcgcctgcccattttatccgtctggatgcgctgccgttaacaccgagcggaaaagtgaaccgcaaagacctaaaacagcgcaaggtaatcgttcaccggtctgaaaagacgggcagactgccgttatcagaagcggaagcgaaagtgaccgcaatatgggaagacctgctgaatacggcgggcatcaaaatcgaagacggctttttcgatgtgggaggcgactcgcttctggctgttgcggcagcagaacgcattaaacaggagctggaatgcgattttaccgtcaccgatttattcgaacactctaccattcaggcgatcagccgatttattgttgaaacaaaacaggcggctgaatcagtggcgcccggacaagatgagagagaaagagaacaaacaccgcaaaacggggtgccgtcttactttgatgacagtgtggcgatagtggggatctcctgccagttccccggcgcgaaaaatcatcatgagttttggaagcagttaagagaaggaaaggaaagcgtccggttctactcggaagaagaacttcgggaagccggcgtgcctgaagatttgatcgaaaatcccgactatgtgccggcattatcgacgatagaaggaaaagatctctttgaccctgagttctttcacatttctccgaaagacgcagaatttatggatcctcagcttcggcttctgctgcttcattcttggaaagccgtcgaggatgcgggatatgtatcgaaagagattccgaagacaagcgtatatatgtcggcaagcaataattcgtatcggtcgcttttgccggaaaaaacgacagaaggccatgaatctcccgacggctatgtgtcatgggtgttagcgcagagcggtacgattccgacgatggtttcccataagctcggattaaaagggccaagctatttcgttcattccaattgctcatcatcattagtcggtctttattcagcctatagaagtataacgagcggagaatcggaatacgcgctcgtcggcggagcaactctgcatgcagcgaccggcataggctatgtgcaccaaaacggattgaatttttcaagcgacgggcatgtcaaagcatttgacgcttcagccgacggtatggcgggcggagaaggagctgccgtcattctgctgaaaaaggcgtcacaagccgttcaggacggagatcacatatacgccatgctcagaggcatcggtctgaacaatgacggagcggataaagtcggtttttacgcaccaagtgtaaaaggtcagactgacgtcatccagcatgttttagacagcacgaatattcacccggagacgatttcctatatcgaagcgcacggcacaggaacgacattgggtgatccgattgaaatgtccgcgctgcagcaagtgtataaacgttacacggaccgggagcagtattgcgggatcggttccgtaaaaacgaatatcggacatttggatacagcagcaggtctggccgggtgcatcaaagtcgccatgagtttatatcatcgggagctggcgcctaccattaattacacgtcaccgaatccgaatatcaaattctgcggttcgccgttttatgtggcggataagagaaaaccgctgccggagagggagacgccgcaccgcgcagcgttaagctcattcggactcggaggaacaaacgcacacgccatttttgaacagtatgaaaacaaaacgatcagcggatcaaatgacggacagccgccttatatcgttccgctgtcagcgagaaataagcagcgtcttactgcctatgcatcttgtttatccggctttctggatgaagccgaaaacgatgtttccttgcatgatctggcatttacgtatcagaccggacgtgaagcgatggaagagagggccgtttttatcagtcatgatcgtcacgatttgaagcgtcagctgcaggatttcatcaacggcaatgaccaaaacatcttacggggcgaaaaagtgagaagcagagaagtgtcagctcaggagatggaagagcttgcggcatgtcagacacgggatgaaaagctgaaagcactcgcggcgctctgggttgaaggagcgcgtgtcgattggggcttattgtatccggattccgcgccgcaaagaatcagtgcgccgacctacccgttcgcagaagagcgcttctggccggaggaaactgtgaagcaaacggataccaagcttttgcatccgctggtacatcagaatacatccgtcttgcaggagcagcggttcagttcggaattcacgggaaaagagtattttattgccgagcatatcattaaaggaatggcgatcgtgccggctgccgttacccttgagatggcacgggccgcggcggagaaaagcatcggcggggcaacagaggaatctctgggcctgcgcttaaagaatattgtatgggtccgtccggtgatagccgatcaggaggctgtccgtgtccatatcggactttatgaagaagaggacggacagattcaatacagaatgtacgggggtaacgattctatcgatgaagaagctcctctttataatcagggcatcgctgaaatcatccggaaggaaccggaggaagcggcggatattgagcagctgaagcgccggtgcacacagggaacaatcgaatctcaagcgttttacaaaggaatgatcggtgctgattacgggccgggttacaaaggggtgcagcttgtatacaaaggcgaagaccggctgcttgctaaattgaagcttcctgaatccgtctctcatacaaaagctgattatatccttcatccgagtatgatggacggtgcgcttcaggccgccgaatatttgcaaaacgtgacgagagcgctgcttgcagaaagcggggaaccattcaaagccgcattgccgtttgctttagaggagctggacgttctgaatccgtgcgctgatgatatgtgggtgcacgtcacattcagtgcgaacaataaagccggcgatcctatccaaaaagccgatattgatttatatgacaataacggcgggctttgtgtgcggatgagaggtttctcaacacggatcatggaagaaaacgcgggtgccggcgtttcggtcagccgtacggacacattgctcgctgaaccggtctggaaagagcagccggaaccggccgatcacaagccttcatatgaagagcatatcattttcctttgtgagtacgatgaagccgtaaaacaagctgtcgaagcaaagcttgaacatgcaagcgtcattatcttggacgagcgtcccgcatctattgcagagcggtatcattcttatgcgggccagctgtttgaccatatcaaaaccataatgaaaagcaagccgaagggccgcgttctttttcaggctgttacgcggtcagcaggcttacagcgggtgttctcaggcattaccggcctcttcaaaaccgcatgccttgaacattccaagctgatttgtcaaatgatcgaagccgaggagaaagaaagtgctgaaggcatagcggaaaaagcgtccgaataccgtatgcatgccgaaagcgtccatgtgaaatatgaaaacggcaagcgctttgccgctgattgggaagagatggatatttctcaagcggagccggacattccgtggaaagacgaaggcgtttatctcattacaggaggtgcgggaggtttaggtctgatctttgcaaaagagatcgcaaaccgtacaaaagacgccgtcatcatactaaccggccggtccgctctcagagaaaagcagaaagacatgctggaaacagtacgtgctgccggcgcttctgttttctacgagcagaccgatgtcacggacgaagcagaagtataccgattgatccgcaatatccgcaaacggcatggcaagctggacgggattgttcacagtgccggcattataaaagacaactacatggtgaagaagacggcagaggaataccaacacgttctcgctccgaaagtgaagggccttgtgtatcttgatgaagcgtcacaacatgagaaattagatgtctttattgtcttttcatccttatcaggtgtgcttggaagcgtcggccaggctgattatgcgtctgcaaatgtctttatggagatgtatgccgagtaccgccgttctttacaagccgcgggacaaagatacggaaagacgctttctgtcagctggccgttatggaaagaaggcggaatgcaggcaggaaagcagacggaagatacgctgatgcaggaggcgggaatcgcaccgctcggcacagatgccggcatcaaggctttatatcaaggcttgatgagcgggacagcccggatgacggttgttgaaggagatgtgaaacacatgaaagcaaaactgttccgcaaagagaatgatcatccggaagcagagaccggcgtacgtcatgacattgatgctgacagcctgcttgaaaaagtgaagcatctgttaaaacagcagacggcctcactgttaaaagtaaacattgacaaaattgatcctcatgaagaaatgacaaaatacgggctggattccatctcgatgactgagtttacgaaccagttaaacaaaacgtaccggcttacgttaacgccgacgattttctttgatcatccgacaatccatgaatttgctgttcatttaatcagtgaatacgaagaggaatttgccggacggtttgcggtaaatacaaaaacggttcaatcggcaagaccggtaaaagagactcaaatcacgcgcccggccgttaagcggcgccgcactctgcctgagacacttccgcacacagtgcagcgggaccaagggcaggaaccgattgcaatcgtaggcatcagcgggattttcccgatggcagaagacattgaagctttctggcagaacctgaaagaaggcaaagactgcatgaccgagattccgaaagaccgctgggactggcgggactattacggggatcccgcaaaagaagccaataaaacaaacgtcaaccaaggcgggtttattgacggaattgctgaatttgatccgttatttttcgggatttcaccccgggaagcggagcaaatggaccctcagcagcgcctcttgctgacgtacgcgtggaaagcgatcgaagatgccggatatgcgtcaaagagtctctcaggcacaaagacaggtgtgtttatcgggaccggaaataccggctacggttctcttttagccaatgccgatgcggaaattgaagggtcatccgcggcgaatacaagtccgtctgtcggaccgaaccgtgtcagctatacgctcaatcttcacgggccgagcgagccgattgataccgcctgctcaagctcactcgttgccatacatcatgccgtttcttcaattgaagaaggaacgtgcgacatggctttggcgggaggaatcaatacgattgttcttccggatgtgtatatcagttttgacaaagcgggcgcgctgagtaaagaaggaagatgcaaaacgttctctgatcaggctgacggttttgcccatggtgaaggagccggtctctttttcctcaaaaagctgaaagccgctgaggcggatggggaccatatttatggcgtcattaaaggaagcgcggtgaatcacggcggccgcgcggcatctttaacaacgcctaacccgaaacaacaggcggaagtcattaaagccgcatacaaaaaagcgggcattgatccgaaaacagtctcttatatcgaagcgcacggcaccggaacagaactgggagatcccgttgaaattaacggcctgaaacaagcgttcagctcgtttgcagacggaaaagagaaagcggccggctattgcggcttagggtcggtcaaaacgaatatcggccatttatcccttgccgcgggagcagcgggcattattaaaattttgctgcagatgaagcatcggacactagtaaaaagtctccactgtgagacggtaaatccctacattcagcttgaagacagcccgttttatctggtgcgggagacaatggaatggaagacgcagacggacgaacgcggaaacgaacagcctcgccgcgcgggcatcagctcattcggcatcggaggcgtgaatgcccacgtcgtcatcgaagaatacattccagaagacagagaggaagcagatgattttcatatcgacccatgtcttttcgttctgtccgccaaaaatgaaaaacgcctgaaagagcaggcaaaacagctgaaacgtgcgcttactgaaaaacggtacgatcaatcctccctcgtttctatggcatataccctccaaatcggaagggacgccatggaagaacgcctggcggttattgccggatctgcagaagaactgcaggaaaaactgtcacagtttatcactggagataagcacgcggacttgtacagaggaagaatagacaaaggcacgctgaaaatgctgacggaagatgaagaaattcaagaagccgttgaaaaatggatggcacgcggcaaatacgcgaagctgcttgaattatgggtcaaagggctgaacgtcgattgggcgaagctgtatggagaccggccgcctaaacgcatgagcctgccatcgtatccttttgcaaaagaccgctattgggcggcaaaaagcaccggaaaacacgaaaaaacaagcactgtatctgcgggaaaacaagacgcgcttcatccgcttctgcacagaaatacttcaaaccttgcagaacagcggttcagttcaatctatacaggaaaagaattttaccttgcggaccatgttgtaaaaggcgtgccgattttaccaggagtggcacatcttgaaatggcgcgcgcagcaatggaacaggcatctgaagttccggccggacaaggaagcgtcaagcttaagaatacggtttgggtgcggccgatcaccattgaagacgagccggttcatgtcaacatccgtctcattcctgaaacggcaaatgacgttcaattcgacatttacagcggccgggaaacagatcagccgtccgtttacagccaaggggcagtatcagtccgccctgacgccgaggctccggtcattgatctccaaaagctgagatcacaatccgccgagacaccgttttctgcagatgaagtgtacgatatgtaccgcaaaatcggttttgattacggcccggctttccggggtgtcaaagcgatttatacaggtgatgatttcgtattgggcagactgtcacttgatgcggcttgtgcggacacggtacaggagtatgtcatgcatccgggcttaatggactctgcattgcaggcatcaagcatattaaccggaacaaatgatgaaaaactgatgcttccgtttgcggttcaggagcttgaagtattcagcgcatgcgctgctgagatgtgggtttacgccagactttctgaagaccacaaagccggccagattgaaaaacgcgatcttgatatttgtgatgaaaacggcaaggtttgcgtaaggctgaaaggtttgtcattcagaacggctgaaaaagaacctgagaaaaaagaaaaagctccggaaacgctcatgcttgagccggtatggacccgaagcgatgaaaccgccgttcaaacggaaccggtttttgcccggcatatcgtgttgctttgtgacacagacgccggattgaaacaagccgttgaagccgcgggagctgaatgtattgaaatgacctcccagcacgggaaagcggcggcgcgcttccgtgattatacaggacggatattggagacgctgcaaaaactgctgaaggaagagacggatggagacgtccttatccagacggttctctctaaaacagataagcatcagctgctctcaggcatttcagctctgttaaaaacagccggcctggaacataaaaaactgaaaacccagctgattgaaataggaccggcggaaaacggcagaatcacagacatcatcagagaaaataaaacacgggctgatgacagccatatcaaatatgaaaacggcatccgatacagcgcagatgtcaaagaaacggccgtgtccggcggcaaaatacgcattccgtggaacgacggaggcatatatctcattaccggaggagccgggggcttaggctttattttcgcgaaagaaatcgcccgcaaagtcaaagagccgacactggttttgacaggccgttccgcattaagcgagaatcagcggatgcagctgcaatcgcttgaatcactcggagcaaaagcggaatacaagcaggctgacgtaacaaacgctcaaactgcggcagacctggtcaaaacgattgagacggaatatggcggccttcacggcatcattcatagcgcgggtgtgatgaaagatcagtatatcgcaaagaaaacaaccgaagagctttacagtgtattggctcctaaaacggacggatttgtcaaccttgatgaagcaaccgagcatttagcgctggactttttcatcgttttctcatccatttccggcgtcaccgggaatgcgggacaggcggattatgcggcggcaaacgcatttatggacagctatgcggcataccgcaacgcactggttaccgcaatgtaccgccacggtcacacattgtcggtcaattggccgctgtggaaaaacggcggaatgcaagtcaatgaagaaatggcgaagctcaccgaaaaaagaaccggcgtaataccgatgcgcactgagaccggaatagaagctctttacaaagcatggagcatggggaaaacaagcgtgctcgtcatggaaggaaaccgcgccgtaatgcgggaaaagctgcttcaaaagactccggcagccgcttttgcaccggttaagaaaacggatgaaacgcctgcgccgaaagacctgacggcaaaacttcaggaattgctggcaaacgaggtttccgggcttctgaaaataaacattgaagaaatcgatatcgaattggagtttaatcaatacggatttgattccattacgctgacggaattcgccaacaagctgaatgacacttatcagcttgatctgacaccgaccgtattttttgaatatgcgacgattcaagccttggcgcatcatttagcagaagactatcaaacacaatttgccggcagcacacagccgaaagaagaaaaacaaagcagcgtaactgatgatggcggtatcagactggcagggaacaaacgatttgcaaaaactgccgtacagcctgttcagacggcggctgaacataaaccggaaccgatcgctattgtcggcatgagcggagtgtttccgaaggccgcaaatattgatgagtattggcgcaacttagaagagggaaaagattgtataacagaggtgccggcggatcgctgggactggcgtgagtattacggtgacccgcttaatgaagccaataaaacaaatgtaaagtggggcggatttattgacggagttgcggattttgatccgctgttcttcggaatttcaccgctggaagccgaacagatggatccccagcagcgcttgttaatgatgtatgcgtggaaggcgatagaagatgcgggatattccgctaaaagcctttccggcacgaaaacaggcctgtatatcggcacggggaataccggatacggctcactgttttccgacctggatatcggcggtgcgtcagccgcaaatatgagtccgtcagcggggccgaaccgcgtcagctatatgcttaatctgcacgggccgagtgaaccgatcgacacggcttgttccagctcgctggtcgcgattcatcacgccgtatgcgccattgaaaacgggaactgcgatatggcgatcgccggcggcgtgaataccgtcgtcacaccgcaaggccacatcgcttatgacaaagcgggtgcgctgagcaaagaagggaaatgtaaaacattctccgacagggcggacggatttgccgtcagtgaaggtgccggaattctgtttttgaaaaagctatcagaagcggaaaaagcgggcgatcatatctacggtgtcattaaaggcagcgcggtcaatcacggcggacgtgcgaactccttgacgacgccgaatccgaaagcccaggcggaagtcgtcagaacggcttatgacaaagcaggcgttgatccgagaacagtcacttatattgaagcgcacggaaccggaacggagcttggcgatccggtcgaaatcaacggcctgaaatccgcctttcaaaagctgtacgaaaaaacaggcgatcccgccgtttacgcgagtcactgcggtctgggatcggccaaaaccaatatcggccacctgtcactggcagccggtgtcgcgggtgtgatcaaagtgctgatgcagatgaagcataaaacacttgcaaaaagcctccacagcgaggtcatcaacccgtatatcaagctgaaagacagtccgttttacatcgtacaggaaaaaagagaatggacggcattgaaagacgaaaacggcaatcatctgccgcgccgtgcgggaatcagttctttcggcatcggcggcgtaaacgcccatgtcgtcattgaagaatatatcccgaaggtagaaagaaaaacagctgttttcacacaccctcaaatctttgtgctgtcggccaaagaagaagagcgtctgcaggaacaggcgcagcagctggcgcaagcttcttttacggatgcggatcttgccgatgttgcttacacgcttcagcaggggcgtgatgcgatggaagaaagagcggccattatcgcttcctcggccgaagaactgcgggacaagctaaagagctgtgcgaaaggacgttatgatatagcgggtatttataaaggaaaagcgggtaaaacctccctgaaatccattctggcaggtgcaaacggcgaggcggatatcgaagagctgataagccgccgagagaatgacaagcttgcggaattatgggtgcagggcgcggatatcaaatgggacggcctatattctgatatcaagcctcaacggatgagtcttcctgcttacccgtttgcgaaagagcggtactggatcacggacaatcggccgaaagcagagaaaccgcaagctgtgccgacgtcgcgggtgctgcacccgctgcttcacgaaaatgtatcagatttaacagagcagcggtaccgatccgaatttacgggacaagagacgattttcaccgatcatcttattaaaggcaagccggttatgccgggcgttgcctacttggaaatggctagggcggcggttgctcaggcagtcaaagggcaaaaggaacgtccttctgtcacccgcctgaaaaacatcgtttgggttcggccgatcgaagcgggacaccgcccgattgaagcgcagatcagcctgaacccgaggggaaacggtgaaatcgtgtatgacatttacacggattcacaaacagaagcaagcggcaggcagatacactgtcagggcgctgccggcattctcagcgccagggaggctccgcaccgtgatataggcgcactgaaagctcaatgcggcctcagtatactgacttctgaacagtgttacgacttattcagcaaaatcggcattgactacggtcccggacaacaaggaattcagcagattcatatcggaagcaatcaagcattggctgagctccggctgccttccttcctcgaagaaacggcagatcaatacgttcttcacccgtgtatgcttgattcagctttgcaagcgacaatcggtctgaagctgcacgcagatgataaccagctgtcactgccgttcgcccttgaagaactggacattttcagtccatgcacgacaagcatgtgggcgtatgtcagctcccggggaacggatgaaaaaatacagcgtatggacattgacttatgcgatgagaccggccgggtctgtgtcaaaattaaagggatttcttccagaatgatggaaggccccgcgccggaaacatcattaaatggagcaaaccttctggctccggtgtgggatctcgcggaattccgtgatcaaagcccggcatataagacggaagaggttgtctttatcgcgggggatgaggaaagcgcggcttttcaattgcatcatccttctgcgaaacggcttcatatcaacccggaggataaaatagaggctgttgcggctgaactgaaagcaacagggtctttcgggcatatcgtatggatcgctccttttcacagcgctgatgacatggtaaaagctcaggatgcgggcgtcatccagatgtacagagtgattaaggccatgcttgctttaggatatggaggcaagcgaatcagcttgactgcagtcacaataaaaacacagtccgtacagccggcggacattattgatccggctcatgcaggcattcacgggttggtcggctcgctcgcaaaagagtatccgaactggcaaacaaggctgattgatgccggctgtccggaagatgtttcaaaggcggagctgttctcagcgccgtttgatgagcaaggcaatacttgggcgtaccggaacaatcactggtacaaacagcgcctcattcctgtacagcagccggtgtcaagccggcccgcttaccaaaaaggcggcgtttatgtcgtcatcggcggcgcggggggcatcggcgaggcatggagcgaatatgccgtgaaaacatatcaggcgcgagtcgtttggatcggcagacgaaaacataacagcgccattcaggaaaaaatcgacagactcagccaattcggcccggcgccgatttatattgaagctgacgcggcaaatccgaatgagctcacacaggcgtatgaaacgatcaaacgcacgcacccgcaaattaacggaatcatccattccgcaattgttttagaggatcagagcctggcaaatatgccggaaagccgtttgaaaagcgtgctcgctgcgaaagtcaatgtcagcgtgaatatggcccgcgtgttccaaaatgagccgctggactttgctttgttcttctcatctgttcaatcatttgcacgagcggccggacaaagcaattatgctgccggatgcagtttcaaagatgcctttgccgctcatttggctcaagttcggccgtattcggcggcagtgatgaattggagctactggggcagtgtcggaatcgtatcatctgccgactatcaagaacggatgaaacaggcgggagtcggatcaattgaagcgccggaagcaatggcagcgcttgaacgattgctcggcggcccgttgaatcagttcgtcatgatgaaacaggcggaagagccggaggaaaaaccggaagaaatgatagaagtataccctgaacatcacggctcggcgatgcaaaaactgcgaagctatcagcctaaagtaacaagacatgtacaacaattgagttaaggaggggacggctttgcaaaacactgaagatcttctttacaaactattggcaggccagctgaaatctgtcggattttttacggaaaacgaaacgcagcctgtcatgcaggggttttacggcaggtggctggaagaaagcatctccatcttggtgcaaaaaggctttttgaaacagtcaggcagtacgtatgtgttaacaggtccgatagagcgtgcggacgttctgtggcaagaatgggatgaaaagaaagctcctttactcaaggacagcagcaaacaggcgatgatcaccttagtggagaccgctctcagagctttgccggatattttatccggcagagtttctgccactgatgttctgtttcctgattcctcaatggaattggtggaaggaatctataaaaacaatgaaacggcagactattataatgaggtgctcgctgacacattgacggctttcattgaagaacgcctgaaagaagacccgaacgcggaaatccggatattagagatcggagcggggacgggcgggacgagcgcggccgtgttcaaaagattaaaagagtacaaacatcatgtgaaagaatattgctacaccgatctgtcaaaggcctttttcatgcatgctgaaaaagaatacggtcccgacaatccgtatttgacttataagcggtttaatgtggaagagcccccggctttgcagggtatagaggcgggcgcatatgacgcggtaattgcggcaaatgtgcttcacgcgacaaaaaatattaggcggacacttcgcaatgccaaagcggtgctgaaaaagaatgggattttgctattaaatgagattagcagccattcggtttattctcacctgacattcggtcttttggaaggctggtggctgtatgaagacgccgaactgcgcattcccggatgcccggggctgtatcctgaagcgtggcagtctgcgctggaaagcgagggatatcggtacgttacatttatggcggaatcgtcacaccacctcggccagcagatcgtggcggcagaaagcgacggcgtcatcaggcaaaagcagccggacgcgcaggcggttgaagaaactgcggcttccaaagagccggctgatttcacagaaccctctttctcagtcacagaccggactgtgcaattcataaaagaaacgttagccaagtccataaagcttgctcccgagcgcattcagccggaaacgagctttgaaaaatacggcatcgactccattttgcaggtgaattttatccgcgaactggaaacattgacgggcgagctgccgaaaacggtcttatttgaacacacgaatacgaaagaacttgccgagtatttgctggaaacttacccggataagctgcaacaggcattcggagccgaacaagcgcctcctgaaacaaagcatccggaacctgcaatgaatgaaccggtgccgcttgtcacggaaacgcggcggtttatcactgaacaaaaagagccaaaagcgccaaagccggaaacagaaaccgtcaccgttaatcgttctgattgtgacgacattgccattatcggcatcagcggccgctatcccgagtctgaaaccctcgatgagctgtgggagcatttaaaagccggagacagctgtattacggaagctccggaaaacagatggaaatccggtcttctgaaaacaatggcaaaagaaacacgaaaagaagaacgcaaaacaaggtacggcggatttctgcagcatattgacgcttttgaccatcacttgtttgacatccgggaagaccatgtgatggagatgacgcctgagctccgtctaagccttgaaaccgtatgggaaacatttgaaaacggaggctactcgttagaaagagtaaacgaatggcaggaatcagacagcggcatcggtgtatttatgggcagtatgtacaatcaatatttctggaatatcccgtcattggaaaaagctgcgctcagctctaacggaggggattggcatatcgccaaccgcatttcccactttttcaatttaacgggcccgagcatgggcgttacgaccgcatgctccagctcactgagcgccattcatctcgcctgtgaaagcctgaagcttaacagctgttccatggcgattgccggaggggtcaatctcacgcttgaaccgtctaaatatgatgcgctcgaacgggcgaatttgcttgaacagggaagtgaaagcaaaagcttcggaaccggcacgggcctgatgccgggagaaggagtcggggcagtgctcttgaagccgctctccaaagcggttgccgacaaagaccatatttacggggtcattaaaagcagcgcgttgtgtcatagcggcggaaggcagatgtacacggctccggatccgaaacagcaggcgaagctcatggcggcttccatcgacaaggccggaatcaatccggaaacaatcagttatgttgaatcagcggcaaacggctctgtattgggagatccgattgaggtcattgccctgacaaatgcgttcgcgcaatatactggtaaaaaacgtttttgcgcgcttggatccgtcaagtcaaatcttggccatttagaggcggcttccggcatgtctcagctcgcgaaagtgctgctgcaaatggagcgggaaacattagtcccgacgattaacgcaaaaccgcaaaatccgaatatcaaccttgaacaaacggctttttacctgcaggaaaaaaacgagtattgggagcgtatgagggatgccgaaacgggggacatcataccgcggagaagcatgattaattccttcggggcaggcggggcatatgcaaatctcatcgtagaagaatatatcagcccgaattccgatcagacccgtcacggcgatgaggaatatattttccctgtgtcagcgaaaacaaaatggagttttgaagcctatcttgacagactggcggcctttttagaaaagacgccatctcttcaaccggccgccatcgcatccgcgctgcaaaaaagaacacatcattcggagtatcgggcggcatttacggcttcctccattcaggaactgttggaaaagctggccgcttaccgtatggatcagcggaatctcaatttctccgattctgatattggccgacgtgcgcggcaatgggaaaaaggagagaatatcgcgtttgatcagttgcagcaagagcacgctgttcatctgccggcctacgcttttgaccacgggacttcttttcaattcggtgaatcagaaaacgctggcggcgttcaggcggtatacagtgatgacgatccatacgtgaaagggcatcaattcagcggagaaccggtactcgtcggcgctacatataacagtctggcagtcgatcatttttgtgatctttttcctgaagcggaaggaggacaaattaaaaaactgaattacgtcagccccattaccgtaaaaaaaggcgatcgcatcgagctgaaaacagaatcgaaacaaaatgggaatgcatttgaactgagcataatgcaccgcagccgcacgtctcctgattggagcatagcggcgtatgccgagtgcagcccgtatccgtttcaaaagcagcacgcggatctggcggccattcagcgctcttaccgggaagtcggccggatagatgagttatacggagacggaacgggaaccgtcgtgtggggagaagaatttaaaacgatcacccgcctgtacaaaggctctgatgccgttttagcgaaagtgaacctgaacaatagcgactcacaacgagcgcatcattatgccgtaaatccattaatcgccaacagtgcttacttggcctcgctttctttattggatcaaacggaggcggaaagctatctgccgttcggcattaattccgtcaccttcagcagccctgaagatcttaccgattgctggctgcacatcaagctgaccaaacaaacgggggaaatgattctgattaacgcagatgtcatcagcagccgatcggaagtggtgatgcgttttgaaggctatgccctgaaacggttccgcccgaaaaccgaacagatgaatcagccggcccgaacggctgttaagaatgcgggagcaccgatttctgccggcagtctgacagatgatatccacagctacgtccttggcaagctcgccaagatgatggatgaacccgggccatctcttcgttctgacgcgaatatcatggaattgggacttgattcagcgagcctgatcgggctgacaaaagagatcggccaagaggcggacatcgatgtgaatccaacattgtttttcgagtatccgaccgcggaggagctgacccgccacttcgcgtcagcatatgagagcaagttttctcaattgcttgccgatcataagcattcagaagaggccagggtcacggaaacagaagagcgcactttaccgaagaaacagcatacgccttgtgataacgccgatgtcaagcaaggaatcgcgattatcggtatgtcagctcagtttccgcaatccccggatatccagtctttttgggagcacatcgtaaacggggatcactgtattaccgaaattccggcggaccgctgggactggcgccgttacgccggtgatgagaatgacacgagtctcagatggggcggttttattgacggtgtcggcgaatttgacccgctctttttcggaatttctcctaaagaagcatcacaaatggggccggagcagtttctgcttttgatgcatacatggaaggcaatggaggatgcgggcctgacaaataaggcgttatcaagcagaccgacaggcgttttcgttgccgcgggcaacagcgatccgaacaatggaacagccattccgtccatcattccgaacagaatatcatatgccttgaatttacaaggaccgagtgaatattacgaggctgcctgcacgtcaaccctggtggcattgcacagggcggttcaatcaatacgtcataacgaatgtgagcaggctgtcgtgggtgccgccaatattctgcagtcgccgaagggctttatcggttttgattcaatggggtatttaagcaaaaacggccgggcgaaatcgttccaaaaagatgccgatggctttgtcagaagcgaagggacgggcattatcatcatcaaaccgcttgaggcggcaattgaagacggcgatcatattcacatggtcattaaaggaacaggagtgtctcacggcggtaaaggcatgtcgcttcacgcaccgaatccggcgggaatgaaggccgcgatgaaaaaagcgtacgaagacaccgacgttgatccgcaaaccgtcacttatattgaagcgcacggcattgcctccgaaatggcagatgcgctggagtttaatgcaatcaaagcgggttacggcgagtctgcaaatcaagaggaaagcgcgccttgttatatcagtaccgtgaaaccttgcatcgggcacggcgaactcgcttccggactggccgcccttataaaagtggcgatggccatgaagcatcataccatcccgggcattcccggatttacagctgcaaatgagcaaatggccattcagaaaagccgcttccgtttcaccgaagacaatcaggaatggatacagctcaccgaccatacgggcagaccgatcccgcgccgggccgcaattaacagctatggcttcggcggcatgaatgcgcatgtcgtcttggaacagtacagcccgagccataaagacaaagaatctgcgcatgaaccgcagcttatcgtgctttctgctaagagtgaagggcgtcttaaggcggccgcaagtcagctggctgattttgtgcaaactggagatactccgtcattgcgggatattgcttatacgcttcagaccggccgtgaggcgatgaactgccgcctggcactcgttgcccgcaatcaagatgaattgctggaaaaactgaaagagtacagagcattttccgaagaaggcaatggaatgaaaagcttctttacaggcagtcagcagactggatcaggagatatcggcgttttactggaagggactctcggtacagtcgtcacagagacgctgttggctgaaaacaatctggaaaagcttgcattttgctgggtgaaaggtgcggatataccgtgggacagactccaccaaggcaaatctgttcaaagagtgccgcttccgacatatccttttgaaaaccataagtattggaacggcggtcagtcagaagacatcagccttgcaccggtttcacagaatcctcagatccgctgcgggagcgcggctgacattgtggctgacattttggggatgaaggcagcggaaatggatcaaaataagccgctgactgaatacggcttcgattcaatctcctctattcagctgttgaagaaacttgaggacggagacagccgcatcagtctggaggctcttcagaaatgcagcactcttcaggagatctgcatgctgttaaaaacgaaccaaccgcaggagacgggccggaattttcccgaactcgtcaagctgaatgaaagagaaaaaggccgtcctgttttttggtttcacggcggaacgggaggcgtggaagcataccagccattcgccaaaaagagtcagcgacctttttacggtatccaggcaaggggtttgacagggaaagagccgctgcaaggaatcgaagagacggccgcttcttataagagaatcatccaagcggtacagccgaaaggcccttatgacctcggcggatattccttgggcggcatgcttgcatatgaaaccgcgcgtctcttgcaggaggaaggtcatacggtaaaaagcgccgtcatgatcgacaccccgtacagtgaaaaatggaaagaaagaaaaccatctgttaagtcagtcatgctgcaaacgatcaatacgatgcttacagcatatcttaagcctgaaaaccttgaagaggcattaatcagcagagaagacattaccgtccaggctgaggaagaagaagtattgaaagaattgatcggccttgccaaaaagcgcggtctgccaaaatccgaagaagcaatccggatgcagctggagcaaatgatgaagacgcagctcgcttacggaatggaagagtatgacatgaagccgctgcctcatccggaagcgctgcaatgctactacttccgtaataaaagcggtttgttcctcggagatcttgaacgttatctgacagcagaggaagaacaaattccgttagaccatgatgcgtattggaaagaatgggaacgccagatgaaacagtttcacctgctggacgtccactcttccaatcatgtcacgatgctgtcggaaccgaagccgcaaaacgccattaaggcattctgcgaaaaactgtacgcaaacaaaggaacgataagcgcaaatttccttaaatctttcagaaaaaagctggacgaaacaaatgagttggtaaaacggtaatagagaacggccggagcaatccggccgctttttttatctatatagaactaaatttactatgtactaaattttcattgttgtattgatttctgtttataagacattaaaaaaacccccgataaacaggggggggcgatgttaaaatctgacaggaaatgtttcaagccctctcaaaaacacattttttctccatgttacattctcggccgcgcctttcagctctatattcggaaaccgttttaaaagcgcagtaaaggcaatggatgcttccatccgggcgagcggagccccgagacaaaaatgaatgccgaatccaaaagagatatgacggttcggtgttctcgctatatttaatgtatcaggatcatcgaaatattccgggtcccgattggctgaaccaatgccgataaatatcatatcgccttttttaatggaaacatttttataggtgaaatcttcaatcgcccatcgatttgccatcatgatgacgggagaggtataacgcaaaagctcttcgaccgccgtctggatattttccggctgccgctttatcttctccatctggtctttgtgcagaagaagcgccagggtgccggagccgagaaggttaaccgttgtttcaagcccggcaacgactaacaaaaacagcatggaatacagctctgattcactcagcttttggccgtcctcttcagcgtaaataagcttgctcgtcaagtcttcacccggatgttttcttttttcttcgatcagtgttttcatatattgtttaaattctttgagagcctggttggtcgcatcttgtccgctttctgacgtgtcgaccattgcgtttgtccacacttgaaatttggcgcggtcctctttcggaatcccgagcagttcggaaatgacgataaacggaagcggtgcggcgaaatctctcatgatatcagggtctgcttttgtttccatttcatccagcagctcttctgtgatctgctctatcccgctgcgaagctgctcaatcatccggggagtgaacccctgatgcaccaaagagcgaagacgtgaatgatccggagggtcttttgccagcatatgctctgagacaaaatcgatatcttcactgacattcagcttcgcgatcagctccttcggcatgacccgttttacatctctcgtaattctgccgtcttttaaaaacgccatacaatcatcataacgcgtgatgagccaagccggaaaggtgcctccgaaacgctgcagttcgaatttatgtatggggtcctgcgctctgaatctgcttaaaaccgcaaaagggttttcgtgaaactcgggtgagtgtgggtgaaacattgttttttccatctggatttccccgccttcatgtttttgaaaagacataacaaacagccggtgcctgccgaccggacggcattcctccttttatctgccgaagacactgatcacaacggctcataagtatgtctaaaatatataaggaaacagaagccggttcaatagacaaatcgtaaagccgccattttcgttgattatcaacaaaacagcaaactttttttgccatttcatcatgtgtgttaaatccggctaatatacatatttacgcttcatatcaacttcttaaggaggatgtgaatgaatgcgtttatgaaatgggcggcaagtctgcttttggtgatctctcttcagttcggccttacgggcgccggcatccattcggacagtgctgctcgtgccgcatcccgatacgatcaggtgctgtatttcccgctgtcaaaatatccggagacgggaaatcatataaaagacgccatttcggcaggtcattctgagatttgtacaattgatcggggcggagcggagaatagaaggaaagaatcattgaaaggaattccgacaaagcccgggtttgaccgtgatgaatggcccatggcagtctgcacagaaggcggggcgggggctgatatcagatatgtaaccccgtcggataaccgcggagccggttcatgggttggaaatcaaatgagcggatattccgacggcacgagagtattatttatcgttcagtagcttctccggttcgccggagtttttttatgctctgaaaaagcggcacgccggctggacatatgaaatggcaaagagtaaacttattatttggaatcagcatgagaaaggattggatcacattgacagtgactacataccgaaatattgcacttttacttctttgtttaacagcgggaattgtggatgtgatcggttatttaagcctgggacatatctttaccgccaatatgacggggaacattgttctgttcggcctggcgatcggcaactcgtggcaccttgccgtactcaaatcgttaacctcgttaatcggatttattgccggcgttattgccgcggccctgcttgtgggcaataaaaagaaatcattctggccccctgcggtaactgccgctttagctattgaaggagctgttttgctgctgtttgctttgttctcctgcttttttgcagatgccatttctgtttatgtgctgattatgctgctcagcttcgcaatgggaatgcagacgacagccgcgagaaaacttggtgtagcggggatttccacgaccgtattaacgggaacgctcgctaatttttttgaagatctcaccgcaaggttttacaaagcggacaagcggaagcagtttacgagagatgctttattgcgcgcgcttgccttggtgctgtattgctttggggcggtcatcggcgcttttgccgaaccggattataagtttgccgtgatctggctcccgattatcattattttaggcattatgctttgcgcattcacgatgttccacggatattcagaagaaaaaaatcaataaaaaaacgccgctgattcagggcgttttttctttttattgctctttccgggtcccgattgtataaacggcccgatctgtatgtacctttaatccgtcttgctccttttggatggtgatgtcgccgagcagtgggatttcatacgcatcttggggaagcgggacatttccttcctccgtataggttgtgccgtgcccttttaagacgagttcttcatccgctacatagtcatcgggatggtttgtccggcggacgagaacatcatcaaggtgaagcatgatccggtccatatcagaaatctcgtttcggctgtctgtcagctctccttttctgatatcaagcgtttgtccgatctgtttttgcagccattcagacaattcggtgtttgtaagtgccattgtgattcctccttttatctacaccatacttattccctatttttttagaaatacactgccttgcattaatcttttttcctgacagccgatttgtgaagcgttccgagttccttcattataaatgtttcatctgttcacctgaaaaacggagtcatctgcaggtgcagacgactccgttctcatgataaaaagttactctttcggcacggcgttttcagcgtttactgcgcccgctccgtaaatgttcggatcttcatttgtccacttatccggactttgtttgatcagtgttttcacttcgtcaggcgaaagctgcgggttctgctgaagaattaaggcagcaatgcccgcacagatcggagtggccatggacgtgcccgacagactgaaatacaaggagcctacacggtttgatttctgtaatttgtcaaggtatgaacgcggagaacggagagatacgatatcgaccccgggcgcaagaatgtcaggcttctcttttccgtacaccgtcgggccgcggcttgagaaagaagcgaccgtatcgtcctcattgctggccgtatcattgtcatcataggcgcctaccgtgatgaccttctcgctgacaccggggcttgaaatcgtttgagcttccggcccggagttgcccgcggcgacgcagacgacgattccttcattccatgcctcttcaacggccttgacgagcgggtcgtccgtttctttatcatatctgagcgcatctccgcccagtgacatgctgatgattctgatcggattctttgtgtgttctttattatattgtatgcaccattccacaccttcgatgatatcagccaaggttcctgatcctgatttgtttaataccttgactccgatcagatcggcttccggcgccggcccctgatatttaccggaagatgaagcgccgctgcttgcaatatcaccggcgcaatgggtgccgtgtccgttgtcatcatacggttctgtcttttggttgacaaagtccgcaaatccgataactctgccttctaaatcgggatgctgatagattccggtatcaataacggcgacggttacgccttttcctgttaatacggtgccgttacgggtcacttcttttgcatgagacgattcagctgccgtttcaaggagcgcttttacttcacggtttaaatagattttacggatatcccggcattgcgaaagaagcatgtgaagggcggacggagtgacttcggcgctgcagcaattgattgtttgaaactgcttttttatggtgcagcgtttttcttttgataagacctgtcctgtgctgtgaaaaccggattcatggcagccctcttcaaattcaatgatgactgacattttctttctgtttttcacctttttttcgaaaaacttgtgcaaaaagcaaggtgtccatttgaaaggtttatataactgtaatacgttttctctgagcggccagtccagcttatgagcatttgaccgcaccatttgtaccattgagtaaccaaacatatatacttttcctcccattctggcgattctctctataccatatgaacaggccgtatgttcggtcagtttgtttgtccttcaggagcgctggttacttgcggctttttcaggagaagaaatcgagttgaaagggaacctttgttcgtttataatgaagccggcggaaggaggtatatacatgaacataatattgagacattccttggaaaaacagcttccgattgatattatatatatgaaaaaagacggctccatttcaaaacggaccattatgataaaaaaaggggatgagcgggctgtaacggcattttgctgtacaaaaaggcagatgagaacttttttgacgggctccattctgtcctgtgcatttgcttcgggaggcggatattcatttttaaaagcgtattcttgatgccgtccgtttccggccgtgaatctcccgcccctgaaaattcgggcgttcctccctttttttttgccctctctcaaccttttttcactgatgtccggcatttgagcgcttgaaccgtgacaatccattgatttttcgaaaccgggaagtttttcactgatgataatgttaatagaatgttaagataagacctattgacaaaaatccatataatgaacatgtcatttttcagaaaggagcaaagaaggagagctgatgaaaagaattttacttaatgtcatcattatcgtagcaatggtcttactaataagatgtgctcattatgcgtcagaccctgatccctcgaattcttctgatacatacacagattttaaagatttggctgaacatgaagaccccgatgattatcatatatcgtacaataagcgaaaggggagtcccgtattaatcatgtcgccgcacggagggagaattgagggcggggtgagcgagatcgtccgctctttcagagatgattattcaacctatctgtttgagggattaaaaacgcatgataaccagactcttcatattacgagcaccaggttcgatgagccttcagcagtcgaaagcattaagcagcaccattatgttatcgcagttcacggttataaaggcgacgagaaaaatactcttgtcggaggaagcgaccggaagcgggcgaaaaaattggtgagagctctcgaacgaaacggattttctgcagaattggcaacctcaaaaaccggtctggccggggttgacaccgaaaatatcaataaccaggcgcaaaccgggctgagcatacagcttgagatcagcagagaacagcgggaagcgttttttgataattttgattaccgcgaaagggaattcacaaaaacggaggaattttaccggtttgtccgtacgataaaaagagtgatcaatcaagagtattcgtaagcttaaaaaaagacaaacgagtgaaagatgagtaaactgaaaaaaaggaggtttgtcccttggcaaaacatcacttttatttaaaagcaaattggcccggaaatcgcaatgacgtcggcgatattaaaagcggccggctggaaacggctgtgtccattcctaaggaaatggacggacccggagaaggcacaaatcctgatgaaatgctgcttggagcggccgcgacctgttatattataacgcttgcggcgatgatggaaagaagcggcctggataaagaagatctatatatggaatctgaaggaattgtagacgtcacgaacggtgtgttcacgtaccagaaaatcattcaccgcccgtttatattattaaagccggatgcagccgaaacggactttacgctcgccaggaagttagcgcaaaaagcagagtcctcatgtatgatttcacgagcggtccaaggaaacgtggagatggagcttgaggttgaagtaaaagctgcccgcgcttgacgagttcaaacggtcagctccgggccgtttgattttttttagctttttgagacttggaacggttcagcaggatgacgcccgtgatgaccaaaacaagcccgatcatcattttgactgtcatggcctccttaaaaacaaaaaagccgacaattgccgttaaagcggtgccgacacctgaccatgtcgcgtatgcggcggataaatcaaggcttttcaatgagaagctcaaaaacataaaagaggctccgattccggcaatgacgccgagagcgggccacaggtgcgtaaaaccgtccgacagcttcagcatcgtgctcccgaacacttctgatacaatggctaatgccaagcaaagtaatcctttcatcagcatgcctctcctttctaccaattcatcaaaatgacaccggctaataagaaaaagagtccgatgacggcctgcttgtccagtttttcatgaaaccatttcgctccgataatggatgcgagcaccgttccggctccgctccatgttgcataggataagctaagcggaatgagattcagtgtcagtgaaagcatataaaaggccaatgaatagcctgccactacaagcgcgctcggcaaaaaccgcgtaaatccgcgggagaccttcagcatggccgcgccgattgactctgataaaatagcaattgtgaggaagatataacccagaatcatatcaaatccccctctcatcataatccttatgccttttgtttaaggcagtaaaataaaataatatccgaactttgcctgccaagtcaagacattaggcctatacaaaaaggcccccgaggaggaacctttttgattcgtcaatagtaatacggatagccgtagccgtaacccccgtacaagtacggattgaataaagcgctcccgacaagccccccgacaagccctccgaaaaacggtccgccgtaaaaaccaaacggccgtccgaatccataaccaaaccaaggccggccaaatccaaaacccggtcgtccgaatccaaatccgaatccgggacgcccgaagccgaagcccggccgtccaaacccaaatccgggacgtccgaacccaaatccaggccgcccgaactgtctcatatcactatctactgcgtatgcgtattcttcattcataattaaggtacctccaagaataaatttgagatgataacagagtattcagcccaccaatttttgattgggcgtttatcaaaaaataaaggagtgagcttttgtgggcctgtatcagtccgattggtcaaaaaaacctccgcacacacacgcataccgggcggttacggatgtagtgcaggggcattaccatttgattgaaggcttttcgcagccggaaaacggcagcaatacagatgagcatacacatttctatacgggcatcacctcgtttgaaaacggccattttcataggtattacggcatttccggccctgccatcccgagggttgacggaacacattaccatgagctttcagagaccacctttgccgcctacaatgagccgattcagatccagcacggcggcgtcgtttacgatccgcgggaggaaggacggaaaacgcaccgccatacactcaaaggaaaaacgagagaggttgtcggaaacgagccgatcgggtggtagcgacgtttagcgctcaggaaaaagggcaaaatggataggtgcctgaagaaatgaatgctataattagggggagatttataaaagagagtgatacatattgaaaaataaaaaacagcctgtcgtcatacttgtcggaccgacggcagtcggaaaaacaaaactaagcatcggactcgcgaaaatgctgaatgcggaaatcatcagcggagattccatgcaggtatataaagggatggacatcggaacggccaaagtcaccgaagaagagacagaaggcgtgccgcatcacctgattgatattttggagccgtccgacactttttcaacggcggattatcaaaaaatggtgaggggaaaaatcaccgagattgccgatagaggaaagctgccgatgattgtcggggggacgggtctgtacattcagtccgtgctgtatgactatacgttcacggaaaactccggcgaccctgtattccgggagcgcatggagaaactggcggctgaagaaggggcggaagcgcttcatgccaagcttgcggcagccgacccggaagcggcggcagccattcatcaaaacaacacgcgaagagtcatccgcgcgctcgaaattctgcatgtatcgggaaaaacaatgtcagagcatcttaaaacccaaaaacgggagctgctttacaatgcggttcttatcggtcttacaatggacagagaagtgctgtacggccggattaacgagcgcgttgacctgatgctggaaaccggccttcttgacgaagtaaagcggctgtatgatatgaatatccgggacagccaatcgattcaggcgatcggctataaagagctgtatgaatatcttgatggaaaagtgccgctccctcaggctgtggagcaattaaaacaaaattcaaggcgatatgcgaaacgccagctgacctggtttcgcaataaaatgcctgtttcatggacagatatgacgccgcctgttgatattgagcagaaaaaaaaggaaattttcgagtgcatagcaggaaaactggaaatttaatcgaaacagtattgtattgagaaccaaggaggacgaaacatgaaaccgattaatattcaagatcagtttttgaatcaaatccgaaaagacaatacgttcgtcacggtgtttttactcaacggcttccagcttcgcggccaggtaaaaggctttgacaactttaccgttttgctcgaaacggaggggaagcagcagcttatttataaacatgccatctccacgttcgccccgcaaaaaaacgtccagcttgagcttgaatagactttttgaaaaagaccatgaacaatggtctttttctatgcgcatctgtatattgcaggctgtatatcggaaacataaaagggggttcggaaaatcgtgttcgaaagtgaaaatgaactgagaagaatcaggattacgctcgtttggatcgctgtttttttgctgtttggagcttgcagcaatcatgagactgtggtgacggatgatgacggcggctcaacggataccgaaccgcagacagaaggcatggtgcagctggaacataatcgtttcggcatcgttgaggacggttacttaaaaatataccgctatgatgaaaaaacgaataaaatcgaactgaaaaaagaaacggcgctggatgagcttgaataaatttcacaagcgttcgaatttacaaagcgggccgcacaagctacactaagtactgacattgatcatgcagagggtgagacgattgaaacacaaggtgataatcaaccattgggaagaaacttgtgaagatgattcctgctatgaatatggaaccagcatcatcgttgacggcaaagaactgatcagagaggcttccatcacaagcgctctgaaagccgtactgaaagaaatcggtgctgatgtggagattgaagaaaccgttgaaagcgaaaaaaaatgtgattcttacaaaaaataagaataaaagtctagactactaagcagttttttttcatgttatgatagacatcggcttacacatgacaccttgagtaggatgagagatgattctcgttctgctctcttttttgggcgttaatcgggccagagccaaagtcggctctttcaaaaatatgaattttttataaattgatctcaatatgttgtgtttttctgagaggttagtatactatatatagtgttaagagattcattatttttgataggtcgtgataaggatggttcaaatcatatttgattcaaagacagggaatgttcagcgttttgtgaataaaacagactttcagctgatccgcaaggtggacgaaacggaccacgtggacactccgtttgttttggtcacctacacgacaaacttcggccaggtaccggcatcaacacaatcatttctcgaaaaatacgcccatctcttattaggagtcgctgcgagcggcaacaaagtatggggcgataactttgcaaaaagcgccgataccatttcgagacaatatcaggtgccgatcttgcacaaatttgaactcagcggcacatctaaagacgttgaattgtttactcaggaggtagaaagagttgtcacaaaatcaagtgccaaaatggatccagttaaataacgaaatcatgatccaacaagatggaaaattccagtttgataaagataaagaggctgtacatagctattttgttgactatatcaatcaaaacacagtttactttcacgatttaaaagagaagctggattatttgattgaaaaccaatactacgaagaggaattcttaagcctttactcttttgaagacattaaagaagtgtttaagacagcttacgcaaagaagtttcgttttccttccttcatgagtgcgtttaaattttataatgactatgctttgaaaacgaatgacaagaaaagaatcctcgagcgttatgaggaccgaatctcaatcgtcgcgctgttcttcgcaaacggcgatactgagaaagcaaaagaatatgtaaacctgatgatcaaccaggaatatcagccgagtacaccgacatttttgaatgccggcagaaaacgccgcggagaactggtgagctgcttcttgctcgaagtcaatgattccttaaacgatatttcacgggcgatcgatatttccatgcagctgtctaaattgggcggcggggtttctcttaacctgtccaagcttcgcgcgaaaggcgaagcgattaaagatgttgaaaacgccacaaaaggcgttgtaggcgtcatgaagcttcttgataatgcgttccgttacgctgaccaaatgggacagagacaaggctcgggcgcggcgtatttaaacattttccaccgcgatatcaatgattttcttgatacgaaaaagatttctgcggatgaagatgtgcgcgtcaagacgctttctatcggtgtcgtcattccggataagttcgttgagcttgcacgtgaggacaaagcggcttatgtattctatccgcatacgatttataaagaatacggccagcatatggacgaaatggacatgacggcgatgtatgaggagcttgtcgacaacccgcgtgtcaaaaaagaaaaagtgaatgcgcgcaaattgcttgaaaagcttgccgttctccgttctgagtcaggttatccgtacattatgttccaggacaacgtaaacaaagagcacgcgaataaccacgtatcaaaagtgaaattctcgaacctttgctctgaggtgcttcaagcgtcacaagtttcggcttacacagattatgatgaagaagacgaaatcggcttggacatttcctgcaaccttggttcattaaatattttgaatgtcatgaaacataaatcgattgagcgcacggtgaaactcgcgacggattccctgactcatgtatctgagacgacggatatccgcaacgcgccggcagtcagacgcgcgaacaaagcgatgaagtcgatcggtttaggcgccatgaacctccacggctaccttgcccaaaacggcatcgcttatgaaagcccggaagcaagagatttcgcgaatacgttctttatgatggtgaacttttattccatccagcgttcagctgagcttgcgaaagaaaaaggcgaaacgtttgagcattatgaaggctccacttatgcaacgggagaatatttcaataaatacatcgaaaaagagttctcaccggcatacgaaaaaatcgctgcgctctttgagggcatgcacattccgacaatcgaagactggaaagagctgaaggcgtttgtcgctgaacacggtatgtatcacagctacagactgtgcatcgcgccgacaggctccatttcctacgtccaatccagcacggcgtccgttatgccgatcatggaacggatcgaagaaagaacatacggaaattcaaaaacgtattacccgatgccgggattagcgtctaataactggttcttctacaaagaagcttatgatatggacatgttcaaagtggtggatatgatcgcgacaatccagcagcatatcgatcagggaatcagctttaccctgtttttgaaagatacgatgacaactcgtgatctgaaccgtattgatctgtatgcccaccatagaggcatcaaaaccatttactatgcaagaacgaaagataccgggcaagatagctgcctttcttgtgttgtttgattaaaggagagtttatagtgacgaaaatttatgacgcagcaaactggtcaaagcatgaagacgactttacccaaatgttctataaccaaaatgtgaaacagttctggcttccggaagagattgctttaaacggcgatatcctcacatggaagtacctcgggaaaaacgagcaagacacgtatatgaaggtactggccggattgactcttcttgatacagagcaggggaatacaggaatgccgatcgtggctgaacacgtagacggccaccagcggaaagccgtgctgaattttatggcgatgatggagaacgccgttcacgcaaaatcgtactctaatattttcatgacactggcaccgactgaaacaattaatgaagtattcgaatgggtcaaacaaaacaaatttttgcagaaaaaagcgcaaatcatcgtcggactctacaaagcgattaaaaaagatgacgagatttcactgttcaaagccatggttgcatctgtgtatttagaaagcttcctattctacagcggtttctattatccgttatatttctacggacaaggaaaactgatgcatagcggtgaaattatcaacctgatccttcgtgatgaagcgatccacggtgtatatgtcggactgcttgcccaagaaatatacaataaacaaacagaagcgaaaaaagcggaacttcgcgaatttgcggttgagcttttagaagagctttatcacaatgagcttgaatatacagaggacttgtacgatcaagtcggactctcacacgatgtaaagaaattcatccgctataacgccaataaagctttgatgaacttagggttcgatccttactttgaagaagaggatattaatccgatcgtattaaacggattaaacaccaaaacaaaatcacatgatttcttctccatgaaagggaacggctacaaaaaggcgacggtagaaccgattaaggacgaagatttttattttggccaagatgaagagcagatataatatctgctcttttggcttgaatggagaggtaagacaggaggaacgggcatgaataaaatggatgaaatcatcttggctgcaccgcggagtgacgtctttcaaaacgaaatgctgacatttcagggagtcaacagcgaggatgaacgtatcgtaaacattatggctcaaattgaggcgcatttttttgaaatcagaagaggcgacgcggaagaggacccgcgatttaaacagccgattccgtatgtcgtcatccgccgcgatgatgaggtgtttgtgtatgaacggctcgccggcggaggggaatcgcgcctccataataagctttctctcggcttcggcggacacatgaaccctatggaaggggcggcttcattttcggaagtgctgaaacagaataccgaccgggagctggcggaagaactgtacattcgcgaggaggacaaacaaaacattgtcacactcggcctgatcaatgatgatgaaaacgatgtagggaaggtgcatatcggcatcctttctgcgctccagttagcgtctgcggcacaagtcgaagtgaaagaaaaagatcaaatcgccggccgctggatgaaactgagcgaactgaaagaggaaaatgtgtatcagcgtcttgaagcttggtctcagtttgtcgccgatatacttcaataacaaaaaacccccgttcgtcccaaaaaagggagagcaggggttttttcatttagtcttgcacaatgaaggcatcaaatccggctttttcggcccgcgctgccaacgcttcagcataatctctggaagagaatgcgccgatctgcactttaaataagccgccttttggaagcacaatcgcgtcaaaacctttagacaccgcatcggcggcaagtgcatcagcatttgctttcactttgaatgcaccgatttgcactttagataagtcagcctttttttttagaccgaaagcttgctccaagcccttggcatgtcctcttgcaaggctttcaataaaactggctgttttcagtttgtttgcatcagctgacgtatcaacaaaaccattctccgtcaaaattgccggcatacttgtctcccgcagcacatggaagttggctgttttttttcctcggtcattaaaacccgatgcttgaatcacttgcgtgtggacggctgattggtaagtcgaggtcggcgctccgacaccggggtaaatatagctttcgaatccggttccgcctcctgagttaatatgaatggataaaaaataatctgcgccccagctgttggcggcatccgttctttccgtcaggctgaccgtcttatcgcttgtcctgctcatcgtgacagaaactccttcatactcattcgtcagaatcgtgcgcaaagccagcgcgatctccagcgtgaccgctttttcctgaagtccgtttccggttgcacctgaatcagttccgccatgaccggggtctataaaaattttaaccattctccatcacctcattacagcatatgatgatattcaaaaggtgcttgtacggctgtcattcatgaaaaaaatgagaaatatacccaacatttcccggaaaataaaaataaatggtttgtcctcccgtttctgttgaatacaataagaaatgaaaaatatttctcgggaaagcgcaggattcaacatcattcccgaagagaacggaaaaagtgacagataaagaggaaaacgggtctcatgatgataggcggatgtcacggaaccgcttcatcatgagtaagataaagagagaacagagaggtgagcatgttggagcgcgctgtaacctataaaaataacggacaaattaacatcattcttaatggccaaaagcaagtgctgacaaatgcagaagctgaggcggaatatcaggccgccctgcaaaaaaatgaagccaaacacagcattctgaaagaaattgaaaaagaaatgaacacattagtgggtatggaagaaatgaaacgcaacattaaagaaatttacgcgtggatattcgtcaaccaaaaacgggccgaacaagggctgaaagtcggaaaacaagctcttcatatgatgttcaaagggaaccccggcaccgggaaaaccaccgttgcgagactgatcggcaagcttttcttcgaaatgaacgtgctttccaaaggacatctgatcgaagcggaacgtgccgatctggtcggtgaatacatcggacacacggcgcaaaaaaccagagatctgattaaaaaatcgctcgggggcattttattcattgatgaagcatactcacttgcaaggggcggagaaaaggatttcggtaaagaggcgattgatacgcttgtcaagcatatggaagacaaacagcatgaatttattctgatcctggcagggtactcgagagaaatgacacatttcctgtcattaaatcccggcctgcaatcgcgtttccctatcagcattgattttccggattactctgtcactcagctgatggacatcgcaaagcgcatgatagcagagcgggagtatcaattaagccaggaagctgagtggaagttaaaagattacttaatgacagtgaaaagcacgacaagccccattaaattcagcaacgggcgctttgtcagaaacgtgattgaaaaatcaatccgcgctcaggccatgagacttttaatgggagaccaatacttaaaaaacgatttaatgacgatcaagagccaggatttacttataaaagatgaggcggcagcttacgaatagacctctcagccggtttgaggggtctcttttttatttctctctttaaaacccgccggatgtgtggtatacgccctgcgggtttggtatgatagtactactgcccaatacgacacagaaaggaacatccatttgaacgaacaggaaggaaaaaaagaaacggtcattttggtcggctgccagcttccgcacatgacagatgagcactttgaacattccatggaagagcttgcttcattgacaaaaacggctgacggaacggtgctgacccggattacgcaaaaacggaacagagcggatgccgctacatatataggcaaggggaaagtagacgagctgaaggcgctgtgtgaagagcttgaagcggatctgatcatttttaatgatgaactgtcaccgagccagcttaaatcactcgccactgcaattgaagcgaagatcatcgaccgcacgcagcttattttggatattttcgcaaaaagagcgaagacgagagaaggaaagcttcagatcgaattggcccagcttcaatacgcgctgccccgtctaagcggacaaggaatcaatctctcaagacaaggcggcggaatcgggacgagagggcccggtgagacaaagcttgaaacagaccggcgccacattagaaaccgcatacacgaaattaacgtgcagctttcaacggttatccgccacagaagccgttatcgggagagacgtaaaaagaacggcgtgcttcaggctgcactcgtcgggtataccaatgccggaaaatcaacatggttcaatcaattaacaagttcagacagctatgaagaagatctgctgtttgcaacacttgatccgatgacgagaaagatggcgctcccgagcggctacagcgtccttttgtctgatacggtcggcttcattcaggatttgccgacgacgctgattgccgctttccgctcaacgcttgaggaagtgaaggaagcagacttgatcattcatgtcattgattcatccaatgaagattatgccgggcatgaacagacggtcctcggtctgttaaaagagcttgaggcagatgatattccggtgctgaccgcctataacaaacgtgatgagacacttcctgacttcatcccgacagcgggagaaggccacatcatgatcagcgccagaatcgccggggatgaagcaaaactaaaagcggaaatcgaagcttatttgcgccgggagctgatgacgccgtatgaagttcatgtgcctgccgccgaaggcaaattgatgtcacgcatcaaatcagagaccatgatcgacagcctttattttaatgaagaaaatgaacgctacgaagtctcaggttatgtacaggaagaacaaagcatactcggagaactgaagaaattcatgtaaggaaggtatacacaacatgtttgatacactgacccacggcgctcttttacaaaaaaccgccgaagaaacagaagcggaaatctccgccgttcataaaagaatagaagaaatcagtgaacggaatgaatggagagtcctgcaaagctacagaaaacataaagtaagcgatacgcattttacgccttcaaccggatacggttatgatgatatcggacgagatacactggagaagatctatgctgatgtgttcggaggagaggcgggactcgtgcggccgcaaatcatttccggaacgcatgcgatttcaatcgcgctctttggtgtgctgagacccggggacgaattgctttatataacaggcaagccttacgatacactcgaggaaatcgtcggagtaagaggcggggagtattcagggtcgcttaaggaatttcaaatcggatacaatgcagtcgatttaacatcagaaggcagagtggactttgaagcggtccgggctgcaatccggccgaatacaaaagtgatcggcatccagcgttcaaaaggatatgcgaatcgtccgtctttcagaataaatgaaattgaagagatgattcgtttcgtaaaggaaatcaaagaagatgtcattgtttttgtggacaattgctacggagaatttgcagaagagcgggaaccctgccacgtcggagcggatcttatggccggctccttgatcaaaaacccgggcggcggccttgctaaaacgggcggctatcttgtagggaaagccaagtggattgaggcctgctcttaccggatgacctcaccgggaatcggaagtgaagccggcgcttcgctttattcactgcaggaaatgtatcaaggtttctttctcgctccgcatgtagtggcgcaaagcttgaagggagcggtatttaccgcccgttttcttgaaaagctcggctttacgtcaaaccctgcatggaatgcgccgagaacggatctgattcaatcagttgagtttcaggaccctgataagatgatcgctttttgccaggcgatacaatatgcttcaccgattaatgcgcatgtgacgccttatccgagctatatgccgggatatgaagacgatgtcattatggcagcgggcacattcgtacagggagcaagcattgaattatcagcagatggacccatcagaccgccttatgtcgcgtatgtccaaggaggattaacctacgcgcacgtgaaaaatgcgatttgcagcgccgtaaatgctttaatggaaaaagagctgatttaggccgtttgcaattttcaaagaatttgatgttaatattccttacattgtgttgacacaaaatataacatcacctataatgagactaagataagaaaaggaggaaattgagatgagtgataacattcgccgctcaatgcctttatttccaattgggattgtcatgcagttaacagaactttctgcccggcaaattcgatattatgaggaaaatggattgatatttccagcgagaagcgaaggaaatagacgattattttcattccatgatgtagataaactgttagaaatcaaaaatctgattgaacaaggcgtcaatatggcggggatcaaacaaattctggataaggcatctgccgaaccggaagaaaaatccgaaaaaaccgccaaaccgatgaagcacgatctgtctgatgacgaactcagaaagcttctgaaaaacgaactgatgcaggcaggccgtttccagcggggaaatactttccgccaaggtgacatgtcccgattctttcattaatccgttagcaactgttttgctatatacatttaccttttagaggaggagttttacgaaatggcaaagtacacaagagaagacatcgtaaaattagtaaatgaggaaaacgtaaagtatatccgccttcaattcacagacattctcggaacgattaaaaacgtggaaattcctgtgagccagcttgaaaaagcacttgataataaatgcatgttcgacggttcttccatcgaaggtttcgtccgtatcgaagagtctgatatgtacttataccctgatctgaacacatttgtaatcttcccatggacggctgaaaaaggtaaagtagcacgcttcatctgtgacatttacaatccggacggcacgccgttcgaaggtgacccgcgtaacaacctcaaacggattctgaaagaaatgaaagaactcggtttcagcgatttcaatcttggacctgagcctgaattcttcctgtttaaattagatgaaaaaggcgaaccgacgcttgaattgaacgataaaggcggatacttcgacctggctccgactgacttgggagaaaactgccgccgcgatatcgtgcttgagcttgaagaaatgggctttgaaatcgaagcatctcaccatgaagttgctccgggtcagcacgaaatcgattttaaatatgccggtgccatccgttcttgtgacgacatccaaactttcaaactggttgtcaaaacgatcgcccgcaaacacggtctgcatgcgacattcatgccaaaaccgctgttcggcgtaaacggttccggtatgcactgcaacctatcactctttaaagatagcgttaacgcgttctttgataaagacgctgatcttcagctgagtgaaacagcaaaacatttcattgccggtatcgtaaaacacgcgacaagctttacggctgtcacaaacccgacagtgaactcttacaaacgccttgttccgggctatgaagcaccttgctacgtggcatggagcgcgcaaaacagaagcccgctgatccgtatcccggcttcccgcggcatcagcacgcgtgttgaagtccgcagcgtagacccggcggcaaacccgtacctggcgttaagcgtattgcttgcagcaggccttgacggaatcaaaaacaaacttgaagcaccggctccgattgaccgcaacatctacgtcatgagcaaagaagagcgcatggaaaacggcatcgtagatcttccggcgacgctggcggaagctctcgacgaattcaaatcaaacgaagtcatggttgcggcactcggtgagcacctgttcgaacacttcatcgaagcaaaagaaatcgaatgggatatgttccgcacacaggttcatccgtgggagcgcgaacaatacatgtctcagtattaatctctcaatcccttggcactattggtgccaggggattttttggttttggtcataagattaaaagaacaacatttttggtccttgaccagaatatgaccaaaaaaaattgaagttataattgaggacacgtatttattgtaatcccttattcggtttaggatgaaggctaaatgaagctaattatgttctaaaattgaaccggccatttttattttcaaaaagcaggagcaggaaattcatcaattttgatacgaagtaaactataaggtttctgtcgtaagtcttttccataatgaaatctagcctgccgatgtaattggttcacgatgacatataagtattcatccggaccaatcgaaaaagtatccggccataaaattctcggatcatgtgcgatggtttccattgtgccattcggcagcatctttctaatactattgttctcataatctccggcataaatggctcctttcgcatctgtaatcattccatcagacgcgcctttttctccccaatacgccacatgataaagtaaatccatgtccggtatatttctatctctcagggcttctgttgagatcgagaacagatgacggctggtcagtggacaaaaaaataatacctttccgtcaggagaaatcgcaataccgtcggatgccagcctaaatggggaagttgaaccatccctgttacgattcatcaaaattttgccttctattttcggtataaaataggaatccggtgaagttggatttgctccatttaaccgtctaaatgcgtttccggtttctaaatccacgacgataatagctcctggtcctttggaagaagaatccgttatataggcataacctgcagttccaacacgaaaatcaaatcggacatcattcaggtaagttgttggaaggacaacatcttctgtaaaggtataaactcttctgattgtattggtttttaaatcaacagcgactaattttgccccgcctttaattggttcagaaaaattgggtgccgccgtatctagtacccaaagggtccctcttccatcagtaactacactttggacactgatgaaagtcattttgatattctcagggttaaccaaattggtttgtaaatcaggataaggctgcaatttatccccaattatttccgccaccgtaaatttaacatcgtctccccatttcggaaaacaaatgaaaatacgaccagtttctgaaacagtaacaccggtaggcatagctccataaaatgcataaaccagttctaaatccccaaaatatttttcaaaaggcagcataggtttcataatatcctcctcaaccaattaaacgggatatcacttatatatgattcgcattttttctagtgcatgtttcttaataagtttttctaaacaaaagatgatggaagttcttatcatttaataagtcagtcaggtgacacaggggggtttacttaacgtctgtcgaagcagtcggcaattacaacatggtatgtcctttggtcggttttaaattctctgaaaaaagagttgaaaaagcagaaaagattttataatatgaaatcaagttagtttgttcgatcaacaaactaataaaaccactttaattgtccatcatgtaaaggtcttaaatgggagggggataagaggctcgatttaattggaggtatataaaaagcgaaagccaagcttttatcctgttcactgctatctgatcaccatttggatgttgaaaatgctctgtgaaagtaaaccgctatcatttttttgaaagcgcttttatatgccgctcactggccgataattttaaagaaatgttataccatttcatcatgttccttatgtaaaggatcgaaaaggggagaaatcatgctcagtgaaaatgtaaagaagatcagcatggttgaaaaagttggatatgcgtctggagattttgcatgtaatttaatttatgcaacagtgtctacgtatcttttgttcttctatacagatgtttttggtttatcggcagcaacagccggtacgatgtttttagtggttagaatcatcgacgctctcgctgatccttttattggaacaatagttgacagaacaaatagcaggtttggccgcttcagaccgtatcttttattcggagcttttccctttgtcatattggcaatactctgttttacaaccccggatttttcggatatggggaaattaatatatgcctatatcacctatgtcggcttatcgcttacatacaccatgataaacgtgccatatggcgcgttaacatctgcaatgaccagaaataatcaagaagttgttagtataacgtctgtccgtatgttatttgcaaatcttggaggacttgtcgttgcattttttgttcccttactggctgcttatttaagcgataattccggcagcgaatctcttggctggcagctaaccatgggtattatgggagttataggcgggtgccttttaatcttttgttttaaaagcacaaaagagcgtgtcacgcttcaaaaatcggaagaaaaaattaaattttcggatatatttgagcaatttcgtgttaatcggcctctagttgtattaagtattttctttattattatttttggagtgaattcaatcagtaattcggttggcatctattacgtaacgtataatttagaaagagcagatttagtgaagtggtacggtttgttgggaagtttgcctgctttggtcattttaccgtttattccaaagcttcatcaattattagggaagaagaaattactaaactatgcattattactgaatatgatcggcctcttagctttacttttcgttccgtcaagtaatgtattcctgatactttcctttcgattgctggctgctgcaggaagtctcactgccgggggatatatgtgggcgcttattcctgaaacaatagaatatggagagtataagaccgggaaaagaatgggcggtcttatatacgctattatcggatttttctttaaatttggcatggccttgggaggggttgtaccgggtttggttctagatcagtttggatatgtggcaaatcaggtgcaaacgccggaggcattgacgggaattttaattacaacaaccattattcccgtgttcttactggttctggccatgattgatattaatttctataacttagatgagaaaaaatataaaagcatggttcgagaattagagaatagagacaaagtttatttggatcatattgacgatttcaaagcttaaaacatgatgagtgaacagaaaatagctgaggaggagttcaaaatgaagatcattaatccagtacttaaaggattcaaccccgatccgagtatttgcagggttggagaggattattatatcgctgtatctacatttgagtggtttccgggagtccagatacaccactcaaaagatttagtcaattggcacttagttgcacatccattacagagagtatcacaattagacatgaaaggaaatcctaattcaggcggggtctgggcgccatgtttaagttacagcgacggaaagttttggctgatctatacggatgttaaggtcgtagatggcgcctggaaagattgccacaattatttagtgacttgtgacacgattgatggtgattggggggagccgatcacattaaacagctcgggttttgatgcttctttgttccatgatacggatgggaaaaaatatttattaaatatgttatgggatcagcgtattgatcggcactcctttggaggcattgtcatgcaggaatattctgataaggagcaaaaactaatcggtaaaccgaaagtgatttttaaaggaactgaaagaaagctgacagaagcgccgcacctttaccgtatcgggaactattattatttattaaccgcagaaggaggaacacggttcgaacatgctgctacaattgcccgttctgcaaatattgagggtccatatgaagtacatcctgataatcctatcttaacgtcatggcatgcgccggaaaatccgctgcaaaaatgcggacatgcatccattgtacaaacacatacaggtgagtggtatttagctcatttaacgggacgtcccattcatccggacgatgattcaatttttcagcagagaggatattgtcctctgggcagagaaacagctattcaaaagctctattggaaagatggctggccttatgtagaaggcggaaaagaagggagcttggaagtggatgcgccttctataccagaaacaatgtttgaagaaacctatccggaagttgatgaatttgaggatgcaacattaaatattaattttcaaacgttaagaatcccgtttacggagaaattaggttcattaactcaagcgccaaatcatttacgattatatggccatgaatccttaacttcgacatttactcaggcatttgtagccagacgctggcaaagcctccattttgaagcggaaacggctgttgcgttttatccggaaaattttcagcaagccgctggtttggtgaactattacaatacagagaactggacggctcttcaagtcacgtatgatgaagaacttggccgtattcttgaattaacgatatgtgataacttttctttttcacaaccgttaaaaaataaaattgtgattcctcgtgaagtcaagtatgtctatttaaaagtgaatattgaaaacgaaaaatattattatttgtattcatttaacaaagaagattggcacaaaatcgacattgcattagaatcgaaaaaattatcagatgattacatccgcggcgggggattctttacaggagcttttgtagggatgcaatgccaagatacgagcggtcatcatattccggccgacttcagatattttcgttataaagaaaaataattagcacatgaaaaaggagatttctattttagaactcctttttcatattagaaggtgcctatgtcagtattgattcagaaatactcctagaataaaaaaacccatctttaaagatgagcgtaaaacatagaagtatgtacattcagttatgaaccatgtcgagaaaatgatcaataacaatagaggacattcctagagcaggggcattttttcctaagatagatggtaataattcatagctattgtctagttgggaataaaccctggatgacacttcgcttttaattgaatgtaaaaccataggatgcgattcaatgatgctgtttcttaaaatgatggcttgcggattaaatgtatttaaaatattggtcaggcctattcctaaatagaaaccaaaattctgtaatgcctgtaaagttccaacatcatttagatgggcaaggtctatgatatcttggctggacacttttttctctttcgtctgaagagatgttaataaagccttctctgaagcatacaattcccagcagcctcggtttccgcagctgcatttaggacccttaaagtctattgtcatatgtcccatttctccagagaatccgccaacccctctatataaatgattgttgatcataacgccgatccctattcctgtaccgatacttgcataaatgatgttatcgtgattttttgcagctccaaatactttttctccgtatgcgccggcatttgcctcattttcaataaaaacgggcacattgaacttcttttggatgaaagattttaagtcaatatctctccagttggcgttcggagcgaaaacaattttttgatttttgtcaatcagcccgggcgcgcatatccctataccaataagaccgtatggagattgcggcatgtttgcaataaagtgatgaatcatctcaattaaaatatctttagtgatttctggagaattgcattccaaatgatggtgttgatcaaggacgatcgtcccttcaagatctgttaaaatgccattaacataatccacgccaacatctattcctacggagtatcctgcttttttattaaaaacaagcataacaggtcttctgcctccgcttgattgtccctgaccgatttcaaatacgaggttttctttcattaatgtgtttacctgtgacgaaacagttgatttatttaatccggtcatttcagataattttgctcttgaaataggagaattcttaagtatttcgtttagtaataacttttggttaacttttttgacaaaggcttgatcagcgatatccacttcatccactccatttgtataatctttaaattaagttgaacgttctgtgttatcgtgcgaaacgcagtacatagcgaatccaacctttattatatctaatgtgttcgtaaaaaactaaaaaaatattgaaaatactgatgaggttatataaaatgaaaataagttagtttgtttgggcaacaaactaatgtgcaacatgacataaaagcatctgtatttgaatgatcatgtttagaatttatttttaagggggaaatcacacatggctcactctcattccggttcagtcaactattttgaaagcgcaaacaaagtgatttacgaagggaaagaatccacgaatcctttagcatttaaatactataattctcaagaagtaattggcggaaaaacgatgaaagagcatttgcgattttctattgcctattggcatacatttaccgctgacggcacagacatttttggtgcagctacgatgcagagaccgtgggatcactataaaggcatggatctggcgagagcgagggtagatgcagcgtttgagctgtttgaaaaactggatgcgccattttttgcttttcatgaccgggatatcgcaccggaaggaagtacgttaaaagagacaaatcaaaatctggatttaatcgtggatatgataaaagactacatgagaaccagcggcgttaagttattatggaatactgcaaacatgtttacgaatccccgtttcgtccatggtgcggcgacttcttgtaatgcagatgtatttgcgtatgccgcagcccaagtaaaaaaaggattagaaacagcaaaagagcttggcgccgagaactatgtattttggggcggacgtgaagggtacgaaactttgttaaataccgatttgaaatttgagcttgataatatggccagatttatgcatatggcagtggattatgcgaaggaaatcgggtatacagggcagtttttgattgaaccaaaaccaaaagagccgaccacccatcaatatgatacggacgcagcaacaaccattgcctttttaaagcaatatggcttagacaatcattttaaattaaatctcgaagccaatcatgccacattagccgggcatacattcgaacatgaattacgcatggcgagagtgcatggccttcttggctctgttgacgcgaatcagggtgatccgcttttaggctgggacacagatgaatttccgacagatttatattctgcgacattagcaatgtacgaaattctgcaaaatggcggtcttggaagcggaggattaaactttgacgcaaaggtcaggagatcttcttttgagcctgatgatttactatatgcccatgttgcagggatggatacatttgcaagagggttgaaagccgcccacaaattaatcgaagatcgtgtgtttgaagatgtgattcaacaccgttaccgcagctttactgaagggattggtcttgaaattgcagaaggaagagctgattttaaaacacttgagcaatatgcgctgaacaatcagccaattaaaaacgaatcagggagacaggagcggttaaaagcgatattaaatcaatacattttacaggtataacaaatgaaaaaagaagctccagatcccgctgtaaaaagatgcaggcagccaagttcccggaattgcccgtcatgaagttactgttatggcgggtcaattcaatggggatctatttagagaggaaggagtgaaaaaatgaagtatgtcattggaatagatcttggtacgagtgccgttaaaaccattttagtcaatcaaaacggcaaggtttgtgcagaaacgtccaaaagttacccgctcatccaagagaaggcgggatatagtgagcaaaatcctgaagactgggtgcagcaaacaattgaagcattggctgaattgatttcgatatccaacgttcaagccggggatattgacgggattagctattcaggacaaatgcatgggttagtactgcttgaccaagatcggcgggtgctgcgtcatgcgattctttggaatgataccagaacgacgcctcaatgtagcaggatgaccgagacatttggcgatcatctgcttgatatcacaaaaaaccgtgtccttgaagggtttacattacctaaaatgttatgggtgaaggcacatgagcctgaactttttaacaaaaccgctgtttttttgcttccgaaagactatgtgagattccgcatgactggcgccattcacactgaatactccgatgcggcgggaacgttacttttacatatgacccgcaaagagtggagcgatgagatttgcaatcaatttggtatttcagcggaagtttgtcctccgcttgttgaatcccatgactgtgtaggatcgctgcttccgagcgttgcggcgaagactgggctgttggaaaaaacaaaagtgtacgccgggggagcagataatgcttgcggtgctgtcggagccggtattctttcttccggaaaaacattatgcagtatcgggacgtcaggagtcatactttcctgtgaagaagacaaagaaagggactttaaagggaaagtgcacttttttaatcatggaaagaaggattctttttatacgatgggagtcacgctcgctgcagggtacagcttggactggtttaaaagaacgtttgcgccgaacgaatcgtttgaacaattattacggggggtggaatctgttccgataggagcaaatggactgctgtacactccttacttagtcggtgaaagaaccccgcatgctgattcatctattcggggaagcttgatcggaatggacggagcccataaaagagagcactttttgagggcgataatggaaggcatcacattctctttatatgaatcaattgagctattccgcgaagcgggaaaatcagttgatacggttgtctctattggcgggggagctaaaaatgaaacgtggcttcaaatgcaggctgatattttcaatacgagggttgttaagttagagaatgaacaaggtcccgccatgggggctgcgatgttagctgccttcggaagcgggtggtttgactctcttgaagaatgtgcagagcagttcattcatgaagcagctgcattttatccaaaagaacaaaatgttcaaaaatataaaaaactattcgagttgtataagaacatttacgttcacacaaaagatctcaatacagctttaaagagctttcgacaaagatgaagaaagaacctcgccaaattggccaggttctttttatattgcacaaaaacagacacggtgatataatcagaacacgcgcgctttttgtatgaaagtcatagttatccatcttatattatgattatatcatgctgaaaagctcttgtcaaatttttttgaaggggagatatagaatgagttctttggttctcggcattcacgaaattgaaaaaacacagcctttgctcgttggaggaaaagggttacatttaggggaattatcaaaaattcaaggaatacaagtaccggaaggattttgtgtcacaaccgcaggatatcaaaaagccattgaacaaaacgaaacgttacaagcgctgttggatcaactgaccatgctgaaagtggagaatcgggatcaaattggtgatgtcagcaaaaaaatccggcaaaccattatggaagcagaaattccttcagatgtagtcaaagcagttgcttgccatctctcccggttcggcgaagaacatgcctatgccgtacgttccagtgcgacagctgaggatttaccgcatgcctcttttgccggtcaacaagacacctatttaaatattaccggcttagatacgatcttgcagcatatcagtaaatgttgggcgtccctatttacggatcgcgctgtcatttaccgtatgaaaaatgggtttgaacacagccaagtttatttatccgttatcatccaaaggatggtgttccctcaggcttcgggaattttatttaccgctgatccgatgaccggaaaccgaaagctgctatccatcgatgccggttttggacttggtgaagcactggtctccggcttagtctctgccgattgttataaagtacaggacgggcaaatcgtcgataagagaatagaaactaaaaaattggctatctatggacgaaaagaaggcggaacagaaacacaggagatcgctcttgatcagcaaaagattcaaacactgactgatgaacaaattttacagctggcacgtatcgggagacagatcgaagctcatttcggccagccgcaagatatcgaatggtgtttggaccgcgatactttttatattgtccaaagccgtccgatcacaacgttatatcccgttcctgaagcgaacgatcaagaaaatcacgtctatatctctgttggtcatcagcaaatgatgacggatcccataaaaccccttggattgtctttttttctgttgacgactgctgcacccatgcgtaaagccggcggaaggctattcgttgatgtcacacatcaactggcatcccctaatgtcagagaagttttcttaaaaggcatggggcagcacgatccgctcttaaaagacgcacttatgaccataatagagcgagatgatttcattaagccgatacctgataaaacggcgccgattcccggcaaaggcaatgcagatatgccggaacaagctgaaaacgatccggcaattgtttctgatttgattaagagcagtcaagcatcgatagaagagttaaaacaaaacatccagacgaaatcaggatctgatttatttcgttttattttggaagatatcaaggaattaaagaagattctatttaacccaaaaagttcggtgttgattcgaactgcaatggatgcttcatcatggattaacgaaaaaatgaacgagtggttaggtgaaaaaaacgcagcagatacgctttctcaatctgtaccccataatattacttcagaaatggggcttgcgctattggacgtcgccgatgtgatccgcccttatccagaagtaattgcctatttagagaatgtaaaagatgatcactttttggatgggctggtgacgtttgaaggcgggcgggaaacccgtgacgctatctatgcttatctcaacaagtacggaatgcgatgtgccggagaaattgatatgacaagaactcgatggagcgaaaaaccaactgcacttgtccctatgattcttaataatctcaaaaactttgagccaaatgccagccagcggaaatttgagcaagggcggcgggaggcgttgaagaaagaacaagagttattagaccgattgaagcaattaccggatggtgaacaaaaagccaaagaaaccaaacgaatgatccgcatcatccggaacttcagcgggttcagagaatatccaaaatacggcatgatcagccgctacttcgtttataagcaggctttactgaaagaagccgaacaactcgcaaaagcgggcgttattcatgaaaaagaggacatatactatctcacttttgaagaacttcaggaagtcgtacgcacacataaattggattaccaaatcatcagcacacgaaaaggcgagtaccaagtatatgaaaaactatctccgccgcgtgttatcacatctgacggtgaaatcgttacaggcgagtacaaacgagaaaatctcccggccggagcgattgcagggctgcccgtttcctcgggagtcatagaggggcgggcacgggttattttaaacatggaagatgccgatttggaagatggggatatattagttacctcctatactgatcccagctggacaccattgtttgtatccataaaaggcctggtcactgaagttggcggactgatgacccacggagcggttatcgcgcgtgaatacggcttacctgcagttgtcggagttgaaaatgcaacccaattgataaaagatgggcagcgaatacgcgttcatggaacagaaggctctattgaaatattataatagcggggtgtgcagcacgtcaccagatatttcccgcattttactaagaaaagccggaacctcttgaaaatgacttaatgtgtgaacaccgtattttgtgggcggaccctttttaaatgagtatggtaggccgctaaggtaccaaacaaaaaagattcagtgactaaatctaacgaatgacaattttaaaaggtgagtaatatcctttttaagttcacaacatctgtaatccgatgaattaaaaacgccttagttttttaacaactatttaggagttttgttcatgaacaagtttttattccgaattggattgttcgcctcattcttcatagcggcaatattggcgcagcaggggaggaaactctcccgcttaccagagtaaaaataaaaaatgtttatctcagattggtttttttaaaaagtaaaaacgccataaaacttcttatggcgtctgtccgaactaagggatgcaatgtttgggagacgaatataaatcgtcaatgtgctagaaaaggaatgcagcacctacaatgattaacaaaatgaacagcacaacgatcaatacgaaagagcttccgccataatttccaccgtagttccccatattattgccacctcctgttgttaggatagtacataatatgccggacgataaaattcgacatagatttaagtctaaataagaaaaaatgaatgttatgtctaaaatgaagagcttctaaaacaataaaataatgggaggttaactgaaagagagaaatggatgggacggtttgctgtttaaagaggagggatatggctaaacatgcaataaaactgtgtatgaaagtggtgagccatgaagttacttcatcatgcagagccacatacgaagaggtacagggaaattatagttaacgaaaatattcatcatttcccgggcaagcgcagtatacgacaaatcaaaacaaatcacaaagggacggaaggtacgatacaaggaggctgcttgcgggtttgtgatgccgataaagtttccgtttcaaaaaggtcatatgtttattcgacacttcacctttattcctgcagaatgcttggaaaagaaagtcggcaaaactgccgactttcctaacggaatttagatctcaacagatctaaagaaaccattgacactatcaccggtgccgctatcatatttcaggatgtattctcctttttggttaacgctgaattcttgaatgaacgttttccccgcatttaatgtcgtagaggatataaggaagaagttgcctgattgagtgaggtataacgatgaccgggacggctgcggatcaactgaaacgaagtatattcccgggcaaggaatatttctttaacctgaaacttttataaagcattaacgtattactttataaaggtaagtaaggaggcttctgaatgggattaaaaaatttctttaatactgagttaaaatgctctatctgcggaaaaacaataaaatcaggggatgagataacagcttatcttacacttccgagtgagaagaagatgcctgtggggagaatggataaagtgttaagcaaacactctgataaggtctgctgtaaaaagtgcagtgagtaggtttttagtgttatgaggaacctctggcgggtttcctcataacaaatatcaaccaattaaattagaaaaaagcgaaattgtgatgattaaagtagataaagaactgagggataccaaagggatcatttttcgtttactttgcttttttgaaggtttgtttagctcgtggatcactgcaccccataaaagcatggatgctaaaatgataagactcatatgtaacaacactcctttgtttctataaattttaccatatatatcacaaggatgtcgattgaacgaacatctctataaaaagaagatgtttatctaaaattgttgaaagattcagtgaactattatgcagattaaattgggcctgtgaagatgaagctgtatacatagcaaaggttcaacagccgttttattgaatatcagatgaatttgcggcgtcttatgaagaactggcttcacagtttgaagaatggatgaatagccaaaccgatgtagaacaaaaaatgaacttaaataacccttggttaggttacagagaaactgcttactcagaaattttattccatgttgccaatcacggaacttatcatcagggcagcataacaactatgttaagacagcagggctacgcttcggcaatgaatgaccttgcattatattggtatcaggattagttcagagagtacttgcaaaatgcataaccgccgaatgatctgtagagcttcttttctgaactaaatgacaaagtctcattcagtctgggtggggcgccgagcaagaatcgagatcaaaggctgccgtatcattcccggcagccttaatgattaggaagtaaaatcgataaccatgcggccggtcactttaccttgctccatttcttcaaaaatatcattcacatcttcaatcgggcgttttgtcactttaggtacaactttaccgtctgcagcaaattgaaaagcttccttcaggtcttctctggtacctactaatgaacctacaacctgaattccatctaacacgagacggggaatatctaaatccattttgtccaccggtaaaccgacagcgactacgcgagctcctgcttttacaacatcaatcgcttgattgaaaggggttttagagacagccgtgatgaccacagcatcaagccctaaatcgttagtcacttcttttgctttagcgatggggtcttcgtttaaactgtttacaaccgcgtcagcgcctaagctcttagcaaaattcaatttttcgtcgctaatgtcgaacgcaatcactttagcgttaaagacattttttgcatattgaacagccaagttgcctaaaccgccgactccaaatacaccgatccattgacctggcttaatttcactgactttaacggctttataagttgttacacctgcacaagtaatgctgcttgctgatgcagggtctaaattttccggcacctttattgcataatcaaccgctacgattgcttcttcagccattgcgccgtcaactgtataaccggcattttttacatcacggcacaaggtttcacggccagttaagcaatattcacagcagccgcagctttcaaacatccaggcaatagagacgcggtcgccctttttcaaacttgttacaccttcaccaatctcagttacaatgcctattccctcatgacctaaagtgacgcctgtaacatccccgaaatcagcatttttaacatgcaagtcagtatgacatacaccacagtattccatcttaactttggcttcaccatgtcgtaaaggacgtaattctttttgtacgatcgctatacttttgtcttttgttgctactactgctttcaaatcatgcacccctttcgaatattggcagaaaatttttacttatcttacaatttagcacactgctctccttttgaaaacccttacatttttttgcggacaagtgtctctacaaaagttgagggagctatgcatttgtcatccgaatggtgtttaaatgggggggggtagtctccaaatgcacagaatgctttgaatttgtggtcgtaatctttctgccgatatttgaattgcactgcagagaattacactggcaggatatgattttccccttagtgaaaagaatttcacgggtaatcatttgaacttgagcgcggctgataaggtgaatggtgatgcaaacagaaatcattacttattgatcacaaaaggagctggctgcggagatgtgtggattaaaggcttttacggattcgaacacgatgagccggatgtagattggtgagcgatacacagtcaaggtatttccttgaccttttttaatggcaataaaatttctggatattaagatagtgaattgatgatctgccaaaaaacatagatcttttaaagtaatggatttatactgattttaaacaatgaaaaaatggaaattttatttttataaaaagcaggtgaactatatgggagcggcgacttggagcaaaaggcaaagctatacctacacattggctttttcaagtttgtcgtatggtttgatcttcgggctatatatgtttgtatactcgggttttgtgccatttgcattggttactgtagttatcattgctttttatgcatttattacttactttttgtttgctgttcctgtgcaactatggctaagaaagaagcctaaaaagtttagtttggttcatcttttcatttatacagcagtcgcttttttagctgtgttcttgttctggtacatagataatccgccaattgatttcacagttttcagaatgcccatttattacataatgagcattgttgctgcgttcatatattggttctgggactctatatttctgagaaattacaatgttcactgcaagtaaagctggtgtttccaaaagaaagcgggtgaggaaaaatgaaatacattgagttgactagggacaatattgatgacaatcatatttgctgtgcattaggtacgaaacaatatgaggatgcggtaaatgaaaagaagagctggctcaaagatcggatgattgatggcttggtgttctatcgcctaaacgaacgggcaaaagtttttattgaatatttacctgcagaagaagcgtgggttccggtaagcgcacctcattttatgtttattaattgtctttgggtctcaggtaaatataagagtaacggacatgcgaaacacttgttagaaaaatgtgtgtcagatgcaaaatcccgcggtatggatggggtagttcatatagtggggaagaaaaaactcccttatttaagtgataagcatttctttgaacatatgggatttgctgtgcaagatgaagcagaaccctattttcagttgatgtcactgacgtggaatgaacatgcatatcctcctgtatttaaaaaacaggtgaaaagtaattccgttaatgatgagggaatcacaatattttatacagctcaatgcccatttgcagtcggattgttaaaggatttaaaggaactgactgaaaagaaaggacttcattttcaggcccggcgaataacgtcaaaagatatggcgcaaaaatccccggcagtttggacgactttcagcgtgttttataatgggacatttctcactcatgagatgatgagcgtgaataagtttgaaaaaatactcaataagcttttaatggcttaactttgttttattactattcctcgtttctatattcgatactaagggtttttcacgaaaattgttcagtactttacatcgcgggcggcaaatgaatgattattgtttttgacaaagatgataatgttcatcattatagtaaaaatagattgagataagttcttcaacaaacaaagaagatctgttgaagaagttcttttcaaagatcgataacaatgaaacaggagactgcaaatgcaaaaaattgaaacccatcgcttaattttaagaaattttacggagagagatgcgcaaggtttgttggaatattcggcacatccgagagtgaattgctttcttgatgacagaatgtctacgttagaagaagctgccgtaaacgttcaaaaaagaagccgagatgactcttatattgcagtttgtttaaaagacagtaatgatctagtcggagaactattttatttaaaagaagagccagatacctattccgtttgttggaatttcaatgcccgttttgaagggaagggatacgcaagtgaaagtgcgaaggctttccttgagtatctctttatgctaaaagaagcaagaaggctttatgcatatgttgaagatgataactgcaggtcacaaaaattatgtgaaagattaggaatgcgtaaagaaggttattttcttgaatttatttcatttacagcacacgaggatggaacacctaaatatgaaaacacctaccaatacgcattgctaaagaaagaatggttaaaacaaaaacatagttaatagaatttgtggggaaataatttcccctttgtcgaaaaaaccttgctgaaagcaggtttttttgtatttaagttcattaggttaccgatcataccaatggattatggaattgaaaaaagtacttagattagtaacgatcaaaaagattaagctgaaggttggggaaaacatgaaattcattatagcaacgttgtaaaattggagagaggatgaatgggatggacattttgcagtttagcgacagaaggagcgggaagtaatcgaatcagcaatgatgcgcttgagaatggaaaagtggttgatactcaaaatgtgaaaagctgttcagagtttagacctattttacagtgagaccggaaatattctcttaatcttctgatgttgttcaaagcggacacctcttgatgcttatgcatgagaaaataataccattgaaatatatgtaatatcaatgaataaggttggaaacggaggggttcaaagttgggtgatcttatgtaaaagaaaggatcaggatgaatgtgaccagcatccaccctgatcaatggggttcacagtgttctatttcattgtattccaatcggaataatattacaagggtgaaaaagaaataagcggaatgttttcggcttcttctgcctctggagcgggaaaaggaaagtgagatgtttgaatgaaaataaatgattatctgaaggaaaggtttccgactttaaaattagtgcccggcatttatcatcaatgggacgtgggaattcatttttctctcggcggcaatatatatcaatttaatgaaagcggtgctttgaatcttgagtattttcagcttgtccatcatcaaaccgccgcacttttcaatgagctgtttgaacatagcgatgacttatttcttgttgccaacgtgtataagcacaaatctcaaggtaatcatgcgagaaaattaaaggtttatcagccgtttctgaagtgtaaggatgacttatatcggattcaagtgaagacctgttcatgcccggtcgaagaagaatatgaaatgcagcagttttctttattatgtaaacggaaagatctgcgtatcccccaattacttaaggcagccgtccacgaagattttccgctgaagccaaggttcgggggctgttccgttgggtatcccgatgttttctttgtgaatatgacaaaagatattattttctttctgtatgatgacagagggtgtgaagtcattgctcttgatgccggaagaatacgaaagctttatgatcaatatcacgattggattgaattggactgaaaatgaacacatgaattcgaatccgcttgtgccggctttgttcttgcctagtccggctgcatgagtataatgggcagaattgaaggacgccagaaactttttttctctcataccaccttctgcatgttaagcttctgtatttattttgaacgaattcctatttgtaaaacggctgaatagaataacataaaagcttttttacacagtgcaggaggagagaaatgtgagggctgaacaccgtgattgtatggaaattggaatttattcatttgcagaattatatcccgatcctctgacagggaaaacagtcagcgcaaagcagcggatagatgaattgatgaagctggcgaaactggcagacgacgcagggcttgatgtattcggtgtaggcgagcatcatcgtcttgattatgcggtatcttcgccgtcggccatcttatcagcgatttcacagatcactgaaaatattaagctgaccagtgccacgactgtattatccaccgcagatcccgtccgtttatttgaggattttgcaacgcttgatctgatttcagacggccgggcggaaatcattgcgggacggggcgcatttttagactcgtttcctcttttcggttatgacgtaggccattataaagaactgtttgaagaacacattgacctttttttaaaattaaattccggggaagaatcggttacctggaaaggacgttaccggccgccgctgcgcgaggcagaaatttctcctcggccttttcgcggaagcattccgctatggttaggtgtttcggggactccggaaagcgcagaacgggccgggcgtgcaggtgcggggttggcattagctgtactgagcggtgatccggtgtcatctaagccgcttgttgacaaataccgggaagcggcttctaaagccggtcatcctccggaaaatgtgaaggttgccgtaaccggacatatgttcatttcaaaaacgaatgaacaggcaatacaagaattttatccgtatcattcaaattactggtctcacgttcattcatatcacgggatcgatgagcctttaacgaaggaagattttgagcgggcgtccggaaaagaaacagctttatttgtgggaagctcacagcagatcattgaaaaaatcatgcatcaatacgagttattcggacatcagcgatttctcgcgcaaatcgatataggaggtatgccgtttaaaaaagccgcggaaaacatcgaacgattagcagcggaagtagcaccggttatccgaaaagaaaccggcaaatccagcgaatgaagttctgagcaaaaggggcggccggtcaatcgcggattcgacaacagaatcggcccggctttttctttatgattataaaaaacaaagggaaaagcgccaacctcattgctttttcctatcaagaaaaggaaggtcatttcatcctctatcgtgaagtgtatataccgaaaggtttttattaacaaaagagggaggatgatgcagtaatgaagggtttagtcaaagctgcagttttaactgttactcttggtattggaggcgctttctattcaagtggtgcatctgcgcacgggtatataaaagagcccgtcagcagagcgtacatgggagcattagagaaacaaacattgggctggacggccgctgcgcagaaatatggctccgtcattgataatcctcagtctgtagaagggccgaaaggatttccggctgcaggtccgccggatggaagaatcgcgtctgcaaatgggggatcgggacaaattgacttcggtttagacaagcagactgcagattattgggtgaaacaaaacatccgcggcggttttaacacctttacttggtactacacggcccctcatgcgacatcaaagtggcactattatatcaccaagaaaaactggaatccgaataaacctttgtcaagagatgaattcgaattaatcggaacggtaaaccacgacggttccaaggcagatacgaatctgactcataagatttttgtgccgactgatcgaagcgggtatcatgtcattttaggggtatgggacgttgcggatacttccaatgccttctataacgtcatcgatgtaaaccttacacaataatctatgaattactgatcggctgcatgttgatacatcggccgatctttttagttttaatgtttgaatgaaaaggggaaaaacagcagagcgccataaacatttcatttatggcgccgtacgatcatggaggtgctgctgacatggatgcggaggtaagaggattcttaataaccgccgaggaaagaagccccaacgatgattaataaaatgaatagcaccacgattaacgcaaaggagctaccataaccacctgagaatcccatataatctcacctcctaaagaggattaatacatattatgccgaaatgaaaagtttgatagggatgttagtttactttttgaaaaaaaagtttttttagtctgcatatattttattctcacatttcttttaaagggggaccgtaaatgcttcctgtaatagaaacggacagacttattcttagagaagttgaaaagaaagatgcaaagcaaatatttgcttgtttttcaaatgcaaatgtaacacgctattatggtttggaaccttttgattcaatggaacaggctgaaaaaatgattggctggtttaaagatcagtatcatgataaaaagggaatgcgatggggaatcgagagaaaagatgcgaagggaataatcggaactattggttttaattcttgggtgcccaagcataagcgggcggaggtcggttatgagattcatccgaattattggaggaatggctatgcttttgaagcgttggagaatgttctttcttttgggtttgaaaagcttgggctgcatcgtataggcgctgttgttttcattgagaatgcagcgtctcatcaattactgataaaggcgggatttcaatctgaaggaattttgagaagatatatgtatcaaaacggactgccccatgatacacgtgtatattctatactgaatgagatcgttaacgaataaattgaaaattcgtcgttttgtcaggtgttctgtggtataaaaagccggtgaagacttattgcagaaccttaaaattgattcgaagccataaagcatttttttgctgcgctttctgcagacggagtttgattgtaagaaacgattccgataatcactaacaagatgatgaacaccaatatgctccacaatactatttttaaagactttgacatggtataccctcactttgaaagactttaccggggctgcgatcggagcccgcacttcaagtatagtcgttataacggtgaaaaatgtgcagtccagttaaaaaaacttgcgggcgctgccgcaagttttctccgtattaaggtctgtggaattcaatatgctgattatcacgatcgaaccaccctctgaatgcccaattgatccagcccccgtctcctttgttatcgaaggacccgtcttcgaagacccagattccgtaagtaataccgtcataaacggctgatccgtaaaattgaacgccgttaaaccggtcttcatattcttgatttaaattgaacaccatgacgttgtacttctgtcctgatgcgtaaaatgttgtttccatgacattttttacccagccggttcggttttgatctgacttaaccgcttcagcaatgcgatctgagattccgagaacatctacgtttacgttcagcccggcatcaacacctgctgcttttacgttttggtctgctgtttgggataatttactttctaacggatttgcaacgggtgaaacgtgaggcgcgtttgcgtgtttagactgactggctgctgaggcactggctgtgaaaggaattgttagagataaagctaagcatgatccgactatcgttctggcgattttcatggctatgacctcctgaggaaatttttaaaaattgttgcaaattcatggtatcgcagaaaaattgagcaagcaaagagtagattttctcaaaagtcatgtcattctatttgtgttgttttctgtaaatgaaatacttttaattaagcgaaaagggaagaaaataatagagtctttttatgtattgtgataggatgaccggattttgggtgaaaatagcccggagaaacgccataataagaaaaacacccggagtttaccgggtgtaaaaagtgttgatatgtcaagttagcagcattttttacattttttgcattttcttttataaacaacgatgtaatcataatcaagatgctttttatcttgtttcttctttttttgtttaggctgttttgggtggtgatcataatgtccgttcatatccatatccattcccatacccatatccatactcatattcctccttttttcatctgacggtagtattctatgacagaaagcatggatggcttggacaaatgaaacggtatgctgaaaaagaggcatctcattcggtataaaaaacaggatcatacccgcccgatagaaaagagaggagatgatcctgatattgagaccctatttgataaccgcaattgcaatgccgtaccctttttcagaactgtataaggctgtcagtttcaataccttccagccttccgcggctttagtcccgattccgttatgagccgtgatataatctcccgggctgaccgtactgtcgacccgtacgtaatgccggccgttgagtccgacaatgtgccattcgtctctggccgctcgtgcttcatagtcagcttcaagagccggactgcagtctgggttttgtttcggcacgcgtaccgtttctcctgtttcctcgtcagtcacattttcgtatatgaaaccgccgaactcgtttgtcaaaaagcggctttgccatccgaagcttgcagctcctgagataaaagcggctgtttctgaaatgacgccgagcatgtaatctccgacgtgagccgattcaattttttcgcctttcactgtgacgattgtcccggcgggaattgtctggccggttacactttcaaaatattctccgtaccctgacagggaagaggtgacagctccggcgaacgtaccgtggccgcccgctgaatccaatttccatttgatggactgatgccctccggcaaccgtgtatggttcttccaatgtaatgctttctgatgacagaatcgttctggagactttgctgcccgtaatatgggcattgtttgaagcggcgataaatgcccttgaaccttcagaacttgaacctccggaagagctgatgatcgcatttctgtcacctctggccgtaatatcgcctgttcccgcaataacggcgcttgtcgggttgaatgcaaaaccggagctggtcgcgagctgtgcgcctccctttaaattgacggggatctgatcataagtctgtccttttatagatgcggccgcgctgtaaccttccgcttgcaccccgagaatgacggcctgactgttaggggacgtaattccgacggaaccgccgtctccgatcatcgtaccgtttataatatttacgttatattggcctccgccgattgagatgcctttaggagatgacttgtatatatcaaaatttaaaattttaacataatcggttttatttgatccgccggatatattgatgtcaacaccggcttgtgtaaagccgcgtattttaatgccgttgatcgtaatattttgactgcggtattgaagagctacgactggattcccgccatagtcgtatgagggatcaccaatagctgtgaatccgtttacattaacgtttttataggcagagatgaccagcgccctcggggtcacaccgtcatagagagcattgaataccggttcaatcgcggtgcaatcggttaaagtaacatcataagccgtcgtgctttcgggatctgaggcctgatgatggccgatatgacgaatatcaaatgaacgtacatcacgatacgaaacatgaccgataatatgaacattttgagaagccggccacaggctgtgcgcctttacctcaatcccgcggatattaccgctcgtatagttatttaaaagccaaacatgtttagagccgtcgtcaatttcaatgccgttcgagtttgcgctgccctcagcatgctctgtgccgcgggggtttccggaatggcagttggaaatgaaaatatactcgctgtaatgggtggtaatgccgtcgtctccggcgccgtatgccacacagttatcaatccatatatatcggcagccgtctttcgtccattctgtttcaggcaaatgatcgtaagtcggagatgtaatatcaataccatggagacccgcgttaaccgtttcaacattcttaatccagccgtattgcacattagcaaacgttaaacagctggaaaactgtcctccggggttcctgactccgcattgacgatcaggattccagtctaaagtcatgttctggacaaaaatattacggtttccattttcgtaatcatcgttagtaatgacccattcgtatgcgggagtgtcctcatgaagcttaagcacggtaatcccttgtccctcaccggaaatggtagtccatgaggggagttttatcccttgaaccaaaaattctcctgcgggaacatttactttgacccggccgttcccgatcgctctccgaaaggcttccgtattgtcccggccgtcagggatcgctccgtagtcctccacattcacttcccgggtgattttattcttaagcatttcgtattcggtatcaagccgttcttttaaaagtgaggtgaccattccttccgccgtcacccgggcatctgcgatctcaagattatcatccgttgcggaatgcttaataaaattctgcatccttgctttgagatgctccaattcagagggctgtgcagggtgagactgcaatggggcgtttaaagacggatcaggaaagtttttaaattgaaccattctaaagacacctctttcttttgatataagcgcctgaggcaggggacagaaaagagtcgcgcgccctttaagcgcttattcttcaaattctttattcagaacgaaattccttttgaaaccaaggtgaaattttaaaaactctgttgaaagaacggatataaagctttgcattattgtaattgaagctgtcatgtgaaaatggaggaaaaaactgataggaggggccctcattttaggtttattctcattggcttcgcagtgcttcctcttcggctgcatatacaccaaaatcaacattcttatcagttaaatggtataatggggcacggattggtcatcaatacgactgaaatagggaagcaaaaggagcagcgaaaatgactttacaaatcaaaattaaatattcagatgatacgcaaacgagaatcagtaaaattgaacagggcgattggattgatctgcgggcagctgaagatataacaatcaaaaaaggtgaattcaaacttatcccgcttggagttgcgatggaactgccggaaggatatgaggcccatgtcgttccgcgttcaagtacatataagcatttcggtatcattcagacaaattcaatgggagtcattgatgaatcatataaaggcgacaatgacttctggttttttcctgcattcgcgcttcgggatactgacatttccaagggggagcggatctgccaattcagaatcatgaagaaaatgcctgaagtggagctgatcgaagtagacaagctcgggaacaatgaccgcggcggactgggatcaacaggcacgaaataaaacgaaaaaagactgcttaacagcagtctttttttatggagacagcagttacattcaatttgtttcgggattcttgaattgggaaatcatacgtcacgttcgaatttgacttcgaaataagcggccgctccgtaaccgtctatgccgggagcaaatatttgagccggacgccagtccagctcagcatattgataaaatgatttcccagcagtcctcactctcctccaaaactaagaagaaggttttcatttttatcatttaagctttccgtctctttgacagaaagacttttttaggttaaaggatagaggttgttttgatgtttttattcttcaagatgaacggaggttttgtccaacgtatataatattgtgacaaaagtgtaaacaaaagaaaggatgatgttatggcaaaaagggttagaagagtagaccgtaaagcagctggcaaagaggcagagcagaagaaaccgtccaaagtcaccctgttctgccgttcgcttcaaaggctgaagcatttgtattgtaacataaacatacaaatgccatcaataaccaaaaaaggaattttagttttaattttaccgtttttgcttctgccgttctttcgggctgatgccgcttcagatatttacggcagtttcgaggaattaaagctgaatgaagatccttccgatttttccatttcaacgcgagagcatgaccctgctgtcctcatattagctatacacggaggaggcatagagccggggaccagtgagttagccagagaaattgccgaaaaccggagtttatatttatttgaagggttaaaatcagccggtaatgcggctctgcatttgacaagttcgcatttcgatgaacctaaggccgtgcaaatggtgaaagagcactctcatgtcatttcattgcacggttacggcagtgacgataaaaagataaaaatcggcggtacagacagagaacgggccgaacttttgaccgatgtgctgaaacgacacgggtatcctgccgttcttcttggcataaatgataaatatgcaggcgtcagtccgaacaaccttgccaatcaatcttcatccggattgagtattcaaattgaaatgagcaccggcttcagaaaatcactgtttgacacttttacgctgaaaagcagagcatccacacaaaacgggaccttttaccaattcacaaaaacgatttctgattttatcagtgacaaatattaataagcacgcctattttgtcggcggggctttttcttttgaaatttatgaaactttaagttcttaagatcgtatacataattgacaggatgaaagaaaagaggtgggcaaatgaaagtgatgatcgggtctatcattcttcttgtcatcatcggattcggtttatggctgatgcttagtccaatctttaaacaagtgggaagcggagccaaaaaattcaaaaagtcatgggaggaagaagatcagcatgagcgaaaataagcgcggaaacacaaaaaaaattatcggcggtgtgattataggtgcagcccttttaattgcgggcgttacagcgtcactattcattgaaaaaataccgaacggttatgtcggggttgtatactcaccgaatggcggggtaaaatccgacacattggaccaaggctggcacttagtcggattatttaataaagtaacggaatatccggtgcgtatgcagacagtgaataatgaaaatataaaagtggcaacctcagacggtaaaaatatagaaatggatatcgcttataactatgtcgtgcagcctgataaagtagtcgatctgtttaacaaattcggagcggtagacgttgaaacgattgaaaatacatatttaaaaacaaggctgtgggatgcggcgcgaaaatcaatcagcaaatactcggttattgacacatacgggcaaaaatctgcagaagccgctgccgatgttcaaaagagatttgctgatgatatgaagagtcttggatttttaattgatgatctgacgcttggcgtaccgaagccggataaagccacacaggaagctatcgatgcaagggtgaagtcttcacaggaacttgaacggacacaaactgaaattaaaatagccgaagccgaagcgaaaaagaaaaaaattgaagcggaagggatcgctgattataacgaaatcataaagaaatcaatgtccgatgagatgatcaaatataaatggattgaaaaatgggacggaaaaacgccgaaagcgacaggcacagactcactgctgcagctgccgctggacgatcagaagcaaaaataaaaagagaaggaggcgattgcctcctttttatgttttttcctgagggtctttttccggcactaattcttcagacgcctcggtttgatagctccatagcgtgctatccgtctctgttgtgtcctgataatcttcgggaattacatattgctgcaaataccggtgaaaaaatgcctcaaaaacagaaatgcaaagtgcagagataaccgatgccgcggcaggcgagacattaaatccgccaatgttcataaggaatatccataatataatgaatgaaatcccgaaatcagctgcaacggctgtgaaattgcttgttctcggcagaatcatgcaatcacccgcaaaataagtgattaaacttaagatcactgtaataaacagaacgtttaaaaaggttacttggtacataagatccagaacaatgtacagtaaagcaagtgtgagcgccgttttagaagcgaaagcaattacgtgtttcatttgaaccaccttcgttatttcgtttagtcttcattgtaagcaatccgcaaatttttaaactggtatatagtggttataaagcatacgttttaataaaatgtgaatagacatcacaggattcacaagttaaaatatgtaaaaagggggatgcaaatgaaaaaatactggatatgtattgctgtttttttattatgttttagcggaatacactcagctaaagcggctaccactgaattcggatcaaaaacaagcttcactttggagggaaatgcaaaagagtttcatattgaaaatccgggggctgtagctgccgacgattactttttaggatataagttcaccataatgaacaactcttcgtgcggtttaagcatgaaactccagcggatggcgctgaacgggaatttttatacattaagttctaaaaactacagcggcagctggttaaacctcagtgcccaggataaaaaatcaattgatccgtatcacaaatacagaattctggttgaaagttcttcaaacgtctgtggccccgtctatattaaagggttttacggtgtagaatattatcattttgattgaaaatagatactcgctaaaggcagcgggtttttttatatttaaaaataacttattgtactatgtactaaatattcatatttaaattttgatgcacccgcccaaagaaaacataaacaaaagtaaattcatcacgcacaaatatacaaagttgaaaaatgaatgaaaagtttctcgagggaaacattattagttgacttcaaaagtgtgatgtcggataataagaatgtaagtttttcctccttagcagattcgtttcttaagccagggcgaatctgctttttttatgcaaaaaaacccctctgtaaggggttttttacgataaatgaagtttaatagaattaatgtacggctctgaatacgccgataactttccccaaaatgcttacgttttgcaggataatcggctccatcgtcggattttccggctgcagccgcacataattgtcttctttatagaagcgcttgaccgtcgcttcatcatcttcggtcatagctacgacgatttctccgttattggccgtgttctgctgtttgacaatgacgtaatctttgtcaaaaatgccggcgtcgatcatactttctcccatgatttctaacataaagacatgttcgcccggaggaaccatccggtcaggaagcggaaaatactcgtcgatattttcaacagccgtaatcggaatacccgccgtcactttcccgatgaccggaacgtttacgacctggcttttcggaatgtggacttcttcttcatccaatacctcaatcgccctcggtttagttgggtcccgtctgatcaggccttttgtctccagccgcgccaaatggccgtgcacggttgaactggaagccagtcctactgcttctcctatctctcttacagaaggcggatatcctttcgtttttacctcttctttaataaaacgcaggatatcaagctgcctttttgatagcttcgtcatatttcgcacctcaaaacgtcgattttaagtagattatagcatgattttcctgacagtacaaacataggttcgaaaaaaacgattgacagaaacgtttgttcgtatatactgaaaggtataaaaagcgaacaaacattcttatcggaggttgtttacatggcgaaagaatctattatatttgtcgggctgtttactgcgattttaagtgccgctattttacttgtctcatgtgcgggaaatgatcagtccctcagccaatatgttaaaataaaggttcaggacggcgatacactctggtcacttgcggatcatgtagcagaaaagaaacacattaataaagaagatttcattgagtgggtgacggagaataatcatctccaaactgctgatataaagcccggagacgaacttattcttccggttaagaaaaagcatccggccgtatatcagctggccattgtcaattagagaggaaagagagaaatgaaggcgctcatttatgcccgcgtaagcacaaacaaagaacagcagcaaacgtcattaaaaagacaggaagaggagctcagtgagattgctgctgcaaacggcatggaagtcgtgaaagtcatttctgagaaagccagcggttacgaaatggaccgcgacggagtatttgaaatgcttgatgaaattaaaaaatcacatattgacgcgatattggtgcaggacgaaacgagattgggaagaggaaacgccaagattgcgcttttgcattgcatttacagggagaacgtaaaaatatatacgacggctcataaaggtgaactggagctttccgaagctgattcgatggtactcgaaatcgtcagtattgttgaggaatatcaaaggaaaattcacaatatgaaaatccggcggggaatgaaaagagccgtgaaaaacggctacaaacctgaacggaatctgaaaaacagacatgaaaacagcggaaaagaaaaaaaagaggttccggtttcggaaattatcaggctgagagccaacaagcttacctttgcagaaatcgcagcgaccttaaggggattcggctacgatgtgtccaaagccacggttcaccggcggtttcaggaatataccgcagacacagaaggcagctgacgcgcatcagttgtaaaaaagactgcgttttagtagtatataatcaacacgcaccaaaggagcttattatgatttctaaagaaaaaatcgcaagaattaacgaattggctcaaaaagctaaatcaaacacgataacggatgaggaaaaagctgaacagcaaaagcttcgccaggagtatttgaaaggattccgctcctcaatgaaaaatacgttaaagagcgtaaaagtgattgatccggaaggcaacgacgtcacccctgaaaaattaaaaagagaacaacagaaaaataatcttcattaaacagaaagaatacggcaatacgtattcttttttcgtatatactaatatcaggatgtgctttacgacaattttcaacaagtttatctcaaatttaagctgaaagagttgagaaaaagtcagcatcgctttatgatgaaaaggtacaacaataaggaaggggattataatggatacaattgaaaagaaatccgttgccaccattcgtacactatctatagacgcaattgaaaaagcgaattccggacatccgggtatgccgatgggagccgctccgatggcatacacgctgtggacgaaatttatgaatgtaaacccgcagaatccgggctggtttaaccgcgaccgctttgttttatcagcaggccacggttcaatgcttttatacagcatgctgcatttaagcggatatgacctcagcattgaagacttgaaacagttccgtcaatggggaagcaaaacaccgggacatccggagttcgggcacacagccggagtagacgctacgaccgggccgcttggacagggtattgcaatggcagtgggaatggcaattgcagaacgccatctggctgagacatataaccgtgattctttcaacgtagttgatcattatacatacagtatttgcggagacggtgatttaatggaaggcatttcttccgaagccgcttctcttgcaggccatcttgaattaggccgcctgatcgtattatacgattctaatgacatttccttagacggcgatttagaccgttctttctctgaaaatgtaaagcagcgttttgaagcaatgaactgggaagttctttatgttgaggacggaaacaacatcgctgaattgacggctgcaattgaaaaagcgcgccagaatgataaaaaaccgactttgattgaagtgaaaacgacaatcggtttcggttctccaaaccgtgcgggcacatccggcgttcacggcgctccgttaggactagaagagagcaagctgacaaaagaagcgtatgcttggacgtttgaagaagatttttatgttccggaagaagtatacgggcatttcaatcaagctgtaaaagaagccggctcgaaaaaagaacaggaatggaatgaactgttcgcggcttataaagaaaaatatcctgagcttgctgaacagctgtcactcggcatgaaaggcgagcttcctaaagactgggatcaggaagttcccgtttatgaaaaaggcagcagccttgcttcccgcgcatcttcaggtgaggtgctgaacgggatcgccaagaaaattcctttctttgtcgggggatctgctgaccttgcgggttcaaataaaacgacaatcaaaaatggaggagacttcacggccaaagactacgccgggaaaaacttctggttcggtgtccgtgaatttgcgatgggcgctgcattaaacggaatggcgcttcacggcggcctccgcgtattcggcggcacattctttgtgttctctgattatttaagacctgccattcgtctggcgtcattgatgggtcttcccgtcacttatgtattcacgcatgacagtattgccgtaggagaggacgggccgactcacgaaccgattgagcagcttgcttctttacgcgcacttcctaacctttctgtgatcagacctgctgacggaaatgaaaccgcagctgcatggaaggttgccgttcaaagccaagatcatccgacagctcttgtattgacacgccaaaacctgccgacgattgatcagcaggctgaagaagcgtatgcgggcgtggaaaaaggggcttatatcgtttccaaagcccaaacggaatcaccggccgctcttcttttagcgacaggttctgaagtcggacttgcgatcgaagctcaagcgaaactggctgaagaaaacattcacgtatctgtagtcagcatgccgagctgggaccgctttgaaaaacaatcggccgagtacaaaaacagcgtgcttcctccgaatgtgacgaaacgtcttgcgatcgaaatgggttcaagcttcggatggggcaaatttaccggtcttgaaggagacgttctcgcaattgaccgtttcggtgcttcagctccgggagaaacaattatgaaagaatacgggtttactgcagaaaacgtggttgaccgcgtgaaaaaacttttaaacaaataacgagacaaaagaggatgagtcaaatcatcctctttttcctgtttatgcgacaaaaatagaaggggcggcgtaacagtaatagacaattctttcttttctccttttgtataatagaaagcaataacgaagcgctgtaaaaggggatgaggaaatggaacgtcattactatacacacctgataaaggatgagtttgcgaaccactacttcgggcgggaaacggctatgtttgagttgtttcgagactatcattggacagacctgacaccccaggaatatcaaatgacagaaaagcaagttcaatatataacggaaccgattccggtgatacatatgcatcagcgtctccagctgcatttaaaccgaatgagttacagccgtttggattccatttaccggcttacactgcccggagaaaagggccgcgccaccttcatgatgaaagacagtttaattgagattgcggcttcgggagattatgaggcggaaacgattttctttgagattctgcgtaaaatcagcccctgttttcttgcaatggatttcaagacacggcgctatgggtggttaaatccggtcagagaaagaaattttgtctaaaaacgaggaaaaagagatgtaaatgttgtataatagcctttggtttagtacactttaaactagacaacatgaaggaggaaataaaatgactttatgggttggcatcctagtgggcgttgtcgcattgctcataggtgttgcactcgggttttttattgctcgtaaatatatgatgagctatttgaaaaagaatccgcctattaatgaacaaatgctacgcatgatgatgatgcaaatgggaatgaaaccttctcaaaagaaaattaatcaaatgatgaaagccatgaataatcaagcgaaataatacgtacagattatgatatagagatacatggttataaaaataaaaaacccggagagggttttttattttggcgtcatgtttcaccccaactgccggtgtgcagttctttttgatattgtatgagaaggtggtcaagctcctggctgagttctatcgtaatgtttgatgtcattccgtttgtcatgacgattttaagcagctctgcccgttttttttcaatttcatttaatagatgctctctaatcacagggatatatcctttcatacataaatctttcacctgagtcgctattattatatccacatttatactgtttttcaaataagaaggagtataatatctcgatgtcaaattaaattatataagctttttctataaaaagtaatccttctcgggaaagtgttaaaaaaatgaaatgattttgtcataactcgaagggagtgtgtcatcgtgagttttaattactttctgacgtttggggccggatttttgtctttcatttctccatgctgtctgccgttgtaccccgcctttttatcttacataactggtgtcagtatggacgaggtgaaaacagaaaaggtgatgctgcaaaagcgcggcctcgtgcatacactttgttttttgcttggtttctccgtgatttttatcgcattgggatatggaacttcgtttatcggcagtttttttacccaatatcatgaagcgatccgccagtttggcgctatcatgctgatccttttcgggctgattactgccggtgtgtttcagccgaaattcatgatgaaagagcggcgcattcactttaagcgccgtccggaggggtttatcggttcggttctgatcggtcttgcatttgcagccggctggtcgccgtgcagcgggcctattttaggagccgtgttttcgctggccaatacaaatccttcttcagcagtgccgtatatgtttttatatgttctcgggtttgcgattccttttcttgttctttcattttttattaccagaatgaattggattcgcaagcatcagctgcttatcatgaaaatcggcggcattcttatgattctgatcggagttatgctgttttttaactggatgagctacattctgatcgttctgtcaaatcttttcggaggatttaccggtctgtaacggattaataacttttgaactattatatacccttttgtttttggtacaataagactagttaatgttaaatatgtggaggggaatatgacacgagttttagttgtagatgacgccaagttcatgagggtgaaaatcagagagattctggaatcggcgaattacacagtggccggggaagcggctgacggtgaggaagccctgtcagtatatcaaaaaatccgtcccgacctggtgacaatggatattaccatgccggtcaaaaacggtatacaggctctgcaggatattttagcttttgacccgaaagcccggatcatcatgtgcaccgccatgcggcagcagcggatcgttctggaagcgattgaattaggcgctaaagactttatcgttaaaccgtttgaagcatctaaagtgctggaggccgttggccgggtaacgggaacgtaaacgtgttctcttttcaaattggttttttttatgtttttggagtatagtatatagtatcaaactccgtgcaagcaaaggaatgataaagatgatgattataatttcatccgttattgcagcggccatggcaatttccgtgatgatcgtcaggattaaatcctccgacaagcccgcttcacctaaaaaaataattctcccgccgattttcatgagtacgggagcgcttatgttcctttttccgattttcagagtgacgggcgaagaatttttggaggccattacgctgggcgtgatcttctctatttttctgattaaaacatctaaatttgagattaaaaataatgaaatctatttaaaacggtcaaaagcgtttgtgtttatcctgattggtctcttggttatcagaatcgctatgaaatccattttgagcacgacgattgattacggagctttaagcggaatgttttggattcttgctttcggaatgattgtcccgtggcgcatcgcgatgtttttgtcttaccgcaaactttcgaatgaactgaagaccgctgatattcagatgaattaaaacctttccgtccgccggaaaggttttttatttgagcagggcttgataaggagtaagatcaatctgtttttcacggagatgcttttttaaaaattgatgatcacgcttaggagtggccagtatgtaacccctgatgattaaatcacggtttatttgttcagcttcctccgctaaggaaagttcaccgatttttccggcgattttcgctttggctacatcccggaagagctccggtacgggagcgaccagttcatccaaaaacaccttgtcaccctcattccataagtgcctgcttttttcaatataatagtcctgccaatccagttctgaccggccgtcttctttcggtaagcgttttaaaaattttcgaaacataaaaaaaccgccgatagacagcaatccgatcatcacgatgacccaaaataaaataaaccacataaaccagccttccagcattgttctatctcctccttactttaaccatattgtaaacgaagacagaatagaagaacacatgaaaaaaagaatagaaaaaaatgatagatgtccagtcattccggttgctagaacatattctatcgtatagtgattctgctatttggccatgggagattcactttgagggtatatgactgatatgaccggacaaaaaagccgcttccattgagggatgaaagcggcttttttatgttatagaggaaattgaaaggaaaaagaggcaggagtctcatttggctccttgttcatggagacggtcagaatatggttggtgaaatcagtgaaaatatgtttgtcattcagataaaaaggaagcatcatttgtttgtttaacgtccgttcaagcgttttaacagagagcataaattcattccccgaaagagtgacggttatcgcttgcacctgcttcagcgccgtcaggtcggcttcaatgatatattgacggcttgtttcatatagatcgatcggcagcgtctcgtcataccaagcatacgggtcctcgtaaaactgccgcagccattcttccgtatcatcaaattcttcagcgttttttgagtgattcatggaagcattcctccatattaaaaagccttgctataacgtatgcagaagctttgaatgggtgaatggcacaaaaaaacagacacggggtctgttttacatatcgtggcttgtattatgtttttgtcttgtatggttgcggtttttcacttttttgcttccgctcagcggttccggctggccggggttatggcccttcggagcatttttatgcatatctttactcgtatttttatttgtcatgttaaagcctcctttttaaggtgttccggctattggtttgtttttctttttttattgttctgccgttcttcttccgtcaggacgagctggtcattttctatataacccgcgcctttgccttggcttttcgcatcattcatgccgttaatgacatgattggctttccgttttaccatgatcatcacctcaacattaatatggctctttacagcccgttgtatgaggcggaaaatcggacaaaatttaccgaaaatcatgctgataagacgatcttattatatttaataaaaacattgatatttacttatgtatgattttatactaagatgaaattgtgagaaaattgtgatggaatgtgaacattcatctaaagaacgatcttgatcattgaagggggattttggagaatgacaaatcagcaaaaagtcgcaacacaagacgttttccaagcaagaaaaacattttcttcaaatgggaaaacatacaactactattcattaaaagcattggaagacgcaggggtcggcaatgtttcaaaacttccttattctattaaggttcttttggaatccgttttgcgtcaggtagacggacgcgtcattacaaaagaacatgttgaaaatttagcaagatggggtactgctgaattaaaagatatcgatgtgccgtttaaaccgtcacgggttattctacaggactttaccggcgttccggccgtagttgacctggcatctttaagaaaagccatggcctctgtcggcggagaccctgataaaatcaatcctgaaattccggttgacctggtcattgaccactccgtacaagtcgacaaagccggtacggaagacgcgttagccattaatatggacttagaattcgaaagaaatgcagaacgttataaatttttaagctgggcaaagaaagcgtttaacaattatcaggccgttccgcctgcaacaggtatcgttcaccaggtaaaccttgagtttttggcaagtgtcgttcatacgaaagaggaagacggagaacttgtgacatatcctgatacattggtgggaacagattcccatacaacaatgattaacggaatcggcgtcctcggctggggtgtcggcggtattgaggcggaagcgggaatgctcggccagccttcatatttccctgttcctgaggtcatcggcgcgaaacttgtcggaaaattgcctaacggaacgacggcgactgacttggcgctgaaagtcactcaagtgctgcgcgaaaaaggcgtagtcaataaatttgttgaattcttcggtcctggtgttgctgagcttccgcttgcggatcgtgcgactattgccaatatggcgccggaatacggagcgacttgcggattcttcccggttgacgaggaagcactttcttacctgcgtctgaccggccgtgaagaagagcagatcgatattgtggaagcatactgccgcaacaacggtttattctatacgcctgacgcggaagagccgatttttacagacgttgtggaaattgatctgtcaaaaattgaagcgaacctatcaggaccgaaacgtccgcaggatttaatcccgctttccgttatgcaggaaacgtttaaaaaacatcttgtcagcccggccggcaaccaaggattcggagcggatgctgctgaagagaacaaagaaatttcatttaaacttaacagcggcgaagatgcggttatgaaaacaggggcgattgcaatcgccgctattacaagctgtacgaatacatcaaacccttatgtattaatcggtgccggattggtagcgaaaaaagcggtagaattaggcttgaaagtgccgaattatgttaaaacatcacttgcaccggggtctaaggttgttactggatacttagtcaactcaggcctgcttccttacatgaaggagctcggctttaacctcgtagggtatggctgtacgacatgtatcgggaactccggcccgctttctccagagattgaagaagcggttgctaaaaatgatctcttgatcacttctgtcttgtcaggtaacagaaactttgaaggccggatccatccgcttgtcaaaggaaactaccttgcatcacctccgcttgttgtcgcatacgcattagcaggcactgtgaatatcaacctgaaaacggatccgatcggtgtcggaaatgacggacaaaatgtttattttgatgacatctggccgtccatggatgaaatcaattctctcgtcaaacagactgttactccggaattattccgcaaagagtatgaaacggtatttgacgacaaccagcgctggaacgaaatcgaaacgacggatgaagcgctgtacaagtgggatcaggattccacttacattcaaaacccgccgttctttgaggaaatgtctgtagagccgggaaaagttgagcctttaagaggacttcgcgttgtcggcaaattcggcgattctgtgacgactgaccacatttctccggccggagcgatcggaaaagacacaccggcgggcaaatacctgcaggaaaaaggcgtttctcctcgtgactttaactcttacggctcacgccgcggaaaccatgaagtcatgatgagaggaacattcgccaatatccgcattaaaaaccaaatcgcaccgggtacagaaggcggatacacaacacattggcctaccggggaagtgacatctatttatgatgcctgcatgcggtataaagatgataaaacgggtcttgtcgtcctggccggaaaagattacggaatgggctcttcacgtgactgggctgcaaaaggaacaaacctgctcggcatcagaacagtcattgccgaaagctttgaaagaattcacagaagcaacctcgtcttcatgggtgtgctgccgcttcagttcaaacagggtgaaaacgcggatacactcggcttaaccggtaaggaagtcatcgaggtggatgttgatgaatctgtacgtccgcgcgacttgctgactgtcagagcaatcagtgaagacggtacggtaaaaacatttgaagttgttgtccgttttgacagtgaagtggaaattgattactatcgccacggcggcattttacaaatggtgcttcgcgataaaatgaaacagtagcagaatgaacaaaagagagaaagcagtctgctttctctctttttatgcgggaggccttgagatgcttgcgaaatggctgggcggaatgttacttatcgggttgttagtgtatgcgggctggaacatttattctgtacaaaaaagtccgaaagaagggacagaagaagggatgaaagcccctgactttacacttgatacattgtcaggaaaaagtatctccctttctgattataaaggaaaaaaagtgctcctcaatttctgggcgacgtggtgcaagccgtgccgaatggaaatgcccgatatgcaggagctgcagaaagaatatcctgatattgcggtagcagccgttaattttacgtcctctgaaaaaaatatacaggctgtgaaatcatttgctgatcattatcagctgacctttcctattctgattgacaaaagcggaattaacggagatttcaacgtgctttcttatccgacaacatacatattagacgaagaaggaaccattcagcatattcgcgtaggcacgatgacaaaaaaagaaatgaaagaaaaactggatctcaaatagaggttcagtttttttattgtgaagggcttaggttttgaaaaattggaaaaaatgaatgaaaacacggaggtgagaagattgaaaaaaatgcgaaaacgttcttttcatgaattggttatggaaaataaacgtgagctgatgaccaatacggaatatttgaatcagcttgaagaaaagctggagcagcggttcaaacaaaaataacctttaatttgcagtcatgtttgcacctccttttgcaaaatatactcttaaggagggatgaacatgggcataaacaagaaagacggccagccgcaatacgctccgagccacttagggacaaaacccgttaaatataaacgcaacaaaggggaaaagtttcatgacaagtcaaacggacatccgattgtcatgcagacgaaaggcgaataacatcaacaaaggagagcagacattatgacaaacaattatcaaaaaccaaatccggatgaccgttccgataacgttgaaaagctgcaggatatggtgcagaatacaattgaaaatatagaagaagccaaagaatcaatggaatttgcgacagatgaggaaaaacagcgcattcaagagaagaatgccagacgcaatgaaagcattgaatcgttccgcagtgaaatccaggatgaatcggctgcaagagaaaacggctatcaatcataataaaaaccagggaaacctggtttttttctctttccggctcgttgtgataaaatggggctaatctgataataagggagcagagaacgttgcatgtgtccaaaaaagaaatagaagtgcgttatgcggaaacagatcaaatgggtatcgtctatcatgccaattacttagtctggatggaggtcggcagaacggcgctgattaaggaactcggattcctttacaaggatatggaagacagaggagtgctgtcccctgtattggatatcagcatttcttataaaaagccgctccgctacggagaaacggctgtcgtacatacttggattgaagaatataacggatttaaaaccgtttacggctaccacatctataatccggatcaagaacttgccatcaaggcgacatcctctcatatatgcgttgataaagagagtttcaaaccgattcagtttcgcaaggcttttcctgattggcatgccgcttacgaaaaggcaaaaaaataaggagcggctgcagttatggcatttggaattacgcgcagggaactggaaagatggaagcgggatgtatcggaagggaaaatcgcttttttaacgcattactggctggacgaccgctttccggaggctaagaccgtgacgaaggccggttcaagcgatctcaataaactgatcagatggggagcggagtacgggctgaagccggagtggattcaccataaaaatgaatttccccactttgacctgctcggtgatacgcaaagaagcatattagaaaaagaacatctgactgatcatctcaaaaggttcaggctgtaaaaaaaagaacgcatccgctgcgttctttttttcttacacgtaatcaaataccggctcttctgcctgatctgaatatgtgactgacaaatcgtgattatcaaagtaccataagtcgctttcttcaataaaaaaggtaatgccttcaacttccgtgctggtgccgatgttcatcggccggtcttttaaaatgccgagagaaaagcctttctgaacgttgctgcatcccccgtaacggacaaagaaacggacatggtcgcctgtttccagatcgagctcttctttgtaccaatccagcgcgcctttcgttactttcatgttcatccggaacactccctttttgtttctcatataaagaaattatctctattataaacgcatatggcattttgatgtcaaaattgaagtttcatcaaaaccatttgatcttcggttctgttttgtttataatccgtttgatgtttgccctgtgtctgtagataacaaacgcggtcaagagcgtcactacgactaataaataagggtcttttacaaacagacagtaaataatcgtataaatccctgttaacattgaagacagagaaacaaatttcgtaaggaataaaaatacgaaaaatactgcaaccatcgtaacgaataacagcggagcataaaacagcaggacgccccctgatgtggctacggctttgcctcccttaaactttgcgaacacggggaatacatggccgattactgctgacacccctgcgagaagaggatgaatggggacgtgcagtaaatatgggagcgccgcggccaaggtgccttttaaaatatcggctgcgatgacaacagatcccgctttaacgccaagcgtgcgaaaagcatttgtagcgcccaaattgccgcttccgtgttctctaatatcgatccctttcgcaagtttgcctacgattaaacctgacgggatgctgcctattacataggccaaaataatcaataaagcaatcaacatctacatttctccttttcaatgtcccttcactctattttaacacgagttgttaccgtctgatgacaagttttttgagaattaagctgacaaagcgctttttttgattccggcgaagcggtcatgtacaatatatcaaaaggagatggtaaagatgcaaaatccttcaaaatcagagattaaagaaattctggatcggagcaaacggatcgcagtcgtcgggctgtcagaccgtcccgaccggacttcttacatggtttccaaagcgatgcaggatgaagggtatgaaattattcccgtcaatccaacgattgatgaggcgcttggcgttaaagccgttgcttcattaaaagacgtggagggaccgattgatatcgtgaatgtgttcagacgctctgagcagcttcccggcgtcgctgaagaatttttacagacggacgctcccgttttttgggcgcagcagggccttgcaaatgaagaagcgtatcgcatgattacagacaaaggacggacggctgttatggatttatgtataaaagtcgcccgcgctgttataaaataggaacaaaaaaagcaaaaatccttggcaaatcaggggtttttgcttttttattgaaagaatactctttgcgtatgatgatgaaacagatacaataaagcatgaacagcttttttagaaacccctttatacaggggtttacagtctgtttgcgatggccggcataaagctatataatagaaagcgaactcatgttcttattcgctgaaaagggcaccagaaagatgaaaagccgttcgaatgtatgtcttgcggcctaaaaaacgagccattcgcttaaatatgttgcgaaatcaagcatattggttataattgtgagtccgaggagaattggaccgaagcttgcgcatactgaaaaacaaagacatgaaaacatttaaaaaagaaaatgattaagagcaggttttttgaaaggggtttgtacgtttggctagaaaacagcaatttgattacaacgaagatgccatacaggtgcttgaaggcctggaagccgtcagaaaacgaccgggaatgtacatcggttcgacggacgcacgcggcctgcaccatctggtatatgagatcgtcgacaattccgtcgatgaagttcttgccggctacggagatcatattatcgtaacgatacataaggacaacagcatctccgtacaggacagaggacgcggaatgccgaccgggatgcataagctcggaaagccgacgccggaagttattttcaccgtgctgcatgccggggggaaattcggacagggcggctataaaacaagcggcggtctgcatggtgtcggcgcatctgtcgtaaacgcattatcggagtggctgacggttactattgagcgtgacggatatgtgtataaacagcggtttgaaaacggcggcaagcccgtgacttcacttgaaaaaatcggaacgaccaaaaaaacgggaacgcttacccattttaaacctgatccgtcaatgttcagcgcaacggtttataattttgacacactgtcagaacgtctgcgcgaatcggctttcttgttaaaaggtttgaaaatagaattaattgatgaacggaacggagtaaaagaagtattttattatgagaacggaattgaagcatttgtcgcttatctaaacgaggaaaaagacgctttatgcgaagtggtttcctttgaaggcgagcatcatgacattgaagtcgatttcgcgtttcagtttaatgacgggtattcagaaaatatgctgtcattcgttaataacgtcagaacaaaggacggcggcacccacgaatcaggagccaaaacggcaatgacaagagcgtttaacgagtatgcgcgaaaggtcgcccttttaaaagagaaagacaagaaccttgaaggcgccgatatcagggaaggtttgtccgcaatcatttccgtgcgtatcccggaggaactgctgcaatttgaaggccagacgaaagggaagcttggcacaagtgaggcgagatccgccgcggatgccgtcatttccgagaatcttgcttatttcctggaagaaaaccgcgatacagcaaccctgcttgtcaaaaaagcgattaaagcaagccaggcccgtgaagcggcccgtaaagcgagagaagaagcgagaagcggaaaaaaacgcaaaaaatcagaagcgacgctgagcggaaaactcacaccggccggttccagaaatccggcgaagaatgaattgtatctggtggagggagactctgcgggaggttctgcaaaacagggaagagaccggaaattccaagccgtgctgccccttcgcggaaaggtcatcaacacagagaaagcaaagcttgcagacatcttcaaaaatgaagaaatcaatacaattattcatgcgatcggaggcggtgtcggcgcagattttgagatagacgacatcaattatgacaagatcatcatcatgacggacgcggataccgacggcgcgcacattcaagtcttgctgttaacgtttttctaccgctatatgaaacctttaatcgagcacggaaaagtcttcatcgcccttccgcctctttacaaagtgagcaaaggaagcggtaagaaagagattattgaatatgcttggtccgacgaagaaatggacggcgttttaaagaaagtcggcaaagggtataccatccagcgctataaaggtctgggagaaatgaacgcagaccagctctgggaaacgacgatgaatcccgaatcgcgaacgctcgtcagagtcaagatcgacgatgcggcacgggtagagcgccgtgtaacgacattaatgggagacaaagtagaaccgagaagaaaatggattgaaaaaaatgttgccttcggattagatgaggaaagcaatattttagaaaatgaaaacttgtcggtcgctgaggaggtttaatagtggcacagccagaattatttcatgatttaccgttagaagaagtaatcggcgaccgtttcggacgctacagtaaatacattattcaagacagggcgctgcccgacgctcgtgacggtttaaagccggtgcagcggagaattttatacgccatgcacgcagacggaaatactttcgataaaaatttccgtaaagcggcgaaaacggtcggaaacgttatcggtaattatcatccgcacggtgacagctccgtttatgaagcgatggtgcggatgagccaggattggaaagtgcggaatgtcctgattgagatgcacggcaataatggaagcattgacggtgatccgccggctgccatgcgttatacggaagcgagattatcttctatcgcatcagagcttttgcgtgacatcgataaaaatacggttgaattcgttccgaactttgatgacactagtaaagaaccggttgttttgcccgccatgttccctaacttgcttgtcaacggatcaaccgggatttcagcgggctatgcgactgatattccccctcatcatctgggtgaggtcattgatgccgtcattaaacggattgaatctccggattgcaccgtcgatgacttgatgcaggtgattaaagggcctgactttccgacaggaggcattattcaaggagtcgacggcattcggaaggcttatgaaaccgggaaaggcaaaattattatccgcggcaaggctgaagtggaatccgtaagaggcggacgggagcagatcgtcattacagaaattccgtttgaaataaacaaagccaatctcgtaaagaaaatggatgaataccgcatagacaaaaaagtcgaaggcatttctgaagtccgggatgaaactgaccgcacggggcttcgggtggtcgttgagttaaagaaagaagccgatgcaaaaggcattttgaatttcttatataaaaacactgatctgcagacaacttataactttaatatggtcgccatacataaccgccggccgatgctgatgagtcttacggccatcctggatgcgtatatttcccaccagaaggaagtggtgacaaaccgctccgtctttgaattgcaaaaagcaaaagagcggcaccacatcgttgaaggactgatgaaggcactgtctgtgttagatgaggtcatagccgtcatccgggcaagcagcgacaagaaagatgcgaaacaaaacttaatgtctaaattcacatttacggagccgcaggccgaagcgatcgtatccttgcagctgtatcgtctgacaaacacggatattacggcgttaaaagaggaagcggaagagctcagcaagaaaattcaggagctcgaagccattttaagtcatgataaaaagctgttaaaagtcattacaagcagcctgaaaaaattgaaaaagacctatgctgacagcagacggtctgtcattgaagaaaagattgaggaaattaaaattaaccttgaagtcatggttgcctctgaggacgtatatgtgacagtcacaaaagacggctatgtaaaacgaacaagccagcggtcatttgccgcttctaacggccaggatttcggtatgaaggatactgacaggctgattcaccaatttgaaatgaatacaacggatgttctcctgctctttaccaataagggaagctatgtttattgtccggttcaccagcttcctgatatcaggtggaaagacatggggcagcacgtaacgaacatcatcacgattgaccgtgatgaaaccatcgtgaaagctataccggtaaaagaatttgatccatcttcatatttattgtttatgacgaaaaacggcatggtgaaaagaactgaaatgacgcattacaaagcgcagcgttactcgaaagcgcttgttgcccttaaccttaaaggggacgacgagctgattgatgttcatgtcacagacggcggcagccagctgtttatcgccacccgcctcgggtacggtttatggttcggtgaagatgaagtaaatgtagtcggtgcccgtgcggccggcgtaaagggcataaatgtaaaagacggtgataccgtcgtatcaggacaaattctgcatgagacagattcgcttgtccttgtcacacagcggggagcaatcaagcggatgaacctatctgaattcgaaaaaacatccagggcgaagcgcggtgtcatcatgctgcgtgagcttaaaaagaacccgcatcgcgcagtcggcgtattcgcgtgcgctttagccgacatgatcgctgcggaaacagaaaaaggcgagagaatcgaaatcgccgtgaagtccttgcgggcgaatgaccgatacagcaacggctccttctttaccgatgaagatgagacagggccggtaacagatgtatggcgtatccccgcatctgatgtttaagagtaaaatgaaaataaaaaacctccgctcattgagcggaggttttactatttagctttcatggctgccgaataagtcagtgatagcgtgaatgacttcgattccctgccatacaaataaattcaatgcagtgaatgaaaacaaccctaaaatcaccattcgtaagataaacaacatgtttaacaacctcctcattttatgttacatagataggcgatgttgaacatgaagctcatcgaaatacgaggactgataaaatttagcgattaaaaagcttttctttcgctgtcttctccgggaagcggggcgtctcctgtctgatatcacgatcagtgagacagaagcggcaaaaagcgccgtcaagatatatgagcccgtcagcgattttttctcatcatcagcattttggccggccttcatttcgtgcatttcctgctggtcggctaccgctttaaaatgatgagcagtatcaaacgcatggggaatggagagcaaatgaaagcttgcaatcgctaaaaataaaatagaagcttttaaaaacaagatttttttcaaatgttctccccccttcataagtctgaatatttttattataataccctaatttaaatgcaaagtaaacatatttattaaatttaaaaaattattatcctggttaagtatataccattccatccatcttttcatctcttttttcttaaagacctatttgttatgatatgcacgcattccttatgacgtgacaacatttttcgggctgtaagataaaaaacggggcatgacagcaaaagacgtgatgaagaaaccgaaacattttcttaaaaaaacttctcaaccactgttgttgtgatataataatactcgttgtgttaaaagatctaacatatgcagcaaaaatgacagtaaaagatatgtaaaagggaggttaaacatggaggctttcatcagtgaaatcataaatgttccaaatgattttatttggaagtatcttgtttatattttagtcggaatcggattgtactttacgttccgttttcgctttattcaattccaatactttattgaaatgttcagaatcgtcggggagaagccgcaaggaaataaaggagtgtcttcaatgcaggcattctttatctcagccgcttctcgtgtcggaaccggaaacttgaccggcgtcgcgctggcgattgcaacaggcggtcccggcgcagtattttggatgtggatcgtagcgattgtcggtatggcttccagctttgtggaaagcaccttggcgcagctgtataaagtgcgttccggtgacgaattccgcggcggtccggcatattacatggctaagggactgggcgcccgctggctcggtattttattcgccgtattgattaccgtttctttcggacttatctttaacgccgtgcagtcaaatacgatttctgtggcgtttgacgaagcatttcatgtgaataaaacagttatcgcaatcattttagctgtattaacggctttcattatattcggcggtctgaaacgtgttgtttccgtttcgcaattaatcgttccggtcatggcgggtatgtatattctgatcgcgctgtatgtcgtgattgtaaatattacagcggtacctgagctgtttgctgcgattgtgaaaaatgcgttcggtcttgagcagatcgtcggcggaagcttaggaagcatcattattatcggtgcgcagcgcggcctgttttcaaacgaagcgggtatgggaagcgcgccgaatgccgcagcggctgcacatgtttcgcatccggctaagcagggattaattcagacgctcggcgtgttttttgatacatttattgtttgtacatcgactgcctttatcattttattgtacagctttacgcctaaaggcgacggcatccaagtgacacaaaccgcattgcagcaccacctcggcggatgggcgccgacatttattgcgattgcgatgtttttattcgcattcagctctgtcgtcggcaactattactatggtgaaacgaatattgaatttattaaaacaagcaaaacatggcttaatatttaccgcgtattcgttgtagtgatggtggtgtacggatgtttggctgacttccagatcgtctgggacatggcaaacttgtttatgggactcttggctctcattaacttagtggcaatcttactgctgagtaatgtagcctacaagatctataaggattatgccgctcagcgcaaaaaaggtcttgatcccgtattcaaagccgagaacaccccggagctcaagcatattgaaacatgggcggaagaagaaggtacaagccccgaacgtaagactgctaactgaggaaacatgcatataattttcaaaaaaccccttacattttgttgtgaggggttttttatgtgaaaaatcgggttatttttactgaaaacagatttttttgaatttattgtatttttctcttgcgtgtgtaagggttttcatataaagttttactaaaccggtttaccaaaccgatttagtcttaaaagaaaggagtattgatgtggcttctgattatggcatttttacgatcggtgatgcgatgatcaccttaaatcccgcaagcaacggacctttgcgttttgttacccattttgaacgaaaagcaggaggagctgaactgaattttgcgattgcatgcgccagattgaatctgcactcaaagtgggtcagcagactggggaaggatgagttcggcagagtgatttatcagtttgccaaaggagaaggaattgatgtgactgacgtctcctatgttgaaggctttcctacatctttaaatgtcaaagagatcagaaatgacggttcaggcaagacgttttattatcgtttcaattcaccaattctgactcttgcaccggaagatataacagagaatatgtttgacggcattcacatcgttcatcttaccggtgtgttcctcgcgcttgataagaaaaatcttgaaattgctgaaagggtgctttccctcgccaaagcaagggggattcccgtatcttttgatccgaatatcaggctgaagctgtggacgatcgaggaggcgcgtgcggcatttcatcaaatctttccgtatactgatattcttctggcgggccgggacgaaatgaaacagctgacaggtataggggaaaatgaagcattagcccggtttgcagagacctattcaatcagtcagcttgtcataaagaacggtgaagcaggttctgcgctgtatcatgatcataagtgggttcacaaagaggctttcccggttgcgcctgttgacacggtaggagcgggtgacggctttaatgccggctacctgtacagttatctgcatggttttgaaccggaaaaacgtctggagtttgccaatgcggtcggtgcgctcgtcaccacagtttccggtgataatgaagggcttccctatctagaagaggttctgtcatttgtaaacaaagagactgtgattgaacggtagcaagcacaacttaaaaagcgggtgagaaaatgaaagcggttcaagtacggaaagcatttgatctggtggtgacggaatgtgagaaaccgtctgttgtccacgcggatgatgttcttgtcaaggtgaagcgggtcggaatttgcggatcagatttgcatatttatcatgggacaaatccgttagcgtccctgccgagagtaatcggacatgaagtcacaggggaagtcgcaaagaccggttctcatgttcggcgtttcaagccgggtgaccgggtagtggttgaaccgatatcttattgcggaacatgctatgcctgccggaaaggacgtccgaacgtctgcaaagcgctttcggtgttcggcgttcatgaagatggcgggatgcgggaatatatcgtggttccggaaaagcagctgcatgccgtttcccccgatctgccctgggaggaagcggtcatggcagaaccatatacgatcggcgcccaggccgtttggagaggccgtgtcgagaaggaagataccgttttgattcagggagcgggaccgatcggaatctgcatattaaaaatggcaaagttcaaaggcgcttctgtcatgataaccgacttgaatgatgaacgcttggcattcgctgaaaaaaacggtgcggacgttaccgtcaacgcgcaaaaagaagatctcgttttgcgggtgaacgaatggacaaaaaatgaaggcgccaatgtcatcattgatgccgtctgtctcccctcaacgtttgaaacgtccattgacgcggtgtctccggccggtcatgttgttgtgcttggttttgatgagaggactgccggcatttctcagcttccgatcacaaaaaaggaagtcacgataaccggttcaagattgcagacgaatcagtttccgtacattacagacttactgaataaaggcatgttaacgcacggcggtcttattacacatacattttcagcagatgacgtccatcaagcatttcagttgatcgaacagcacccgggcaaggtgggaaaagcaatcattacgtttgattaaaggaggagcgagaatgctgcctaagtacgccatttacgaaaaacttctgcatgcacaagtagtggctgtcataaggggacaaaacagccaagaggcgcttgaagtttcaagagcggccatttcaggaggtatcagcgccattgagcttacatacacaactcctgaagtggaagatgtctttaaggaactccggcatcaagatattcttcttggagccggctctgtaatggatacagaaacggcgagacacgccattttatcaggcgcctcatttatcgtcagctctcattttgtaaaagagatagcatctctatgcaaccagtacagcgtaccgtatcttccgggatgcatgagcgtgtctgatatggctttggcgctcgaagccggatgtgatgtggtaaagctgttccccgctaattcgtttgacccttcatttatcaagtcggtcaacggccctctgccgaatgtccgcattatgccgaccgggggtatctcattaaacagcatgaatgactggctctctgccggagcggtcgcggtcggtgtgggaagcgacttgacaaaagcatatcaaaagggcggctatgaagctgccgtatccctcagcaaagaatacgtctgccgaaaaaacgaatatacgggggtgtaacatgaatatcacgtttcgctggtacggccaaggtaatgatacggtgactcttgaacatgtcagacaaattcccggggtcaaaggcatcgtctgggctcttcaccagaagcccgcgggcgaagtatgggaaaaggaggacattgaggcggaagtcagatacattcaatcctatgggtttcatgcagaggtcgtggaaagcgtgaatgttcatgaagccattaaactcggtcatgaagaacgcggacaatatattgagcactataaacagaccattcgcaatctgtccgaattcggcgtgaaagtcatctgttacaatttcatgccgatatttgactggacgcgtaccgatatgttccgtgcgctggaagatgggtcaaccgctttgttttttgaaaaagcgaaagtggaaagtctccctccggaggaactgatccgcacggttgaagaatcttctgatttgacgattcccgggtgggaaccggagaaaatggcccggatcaaggaactgtttgaggcctatcaaacggtcggtgaaaaacagctttgggccaatctagaattttttttacatgaaatccttcctgtagcggaggaacacggcattcaaatggccattcatccggatgatccgccctggtcaatttttggcctgccccgtattatcaccggtgagaaaagttatgaaaagctgcgagagatttcagattcacccgccaactgtattacgttgtgcacgggttcgatgggagcggatcccgccaatgatatggtgaagatcgccaaacactatgcgggagctgcgccgtttgcccatatacgaaatgtgaaaatctgcgataacggtgattttacggaaacttcgcatcttaccagtgatgggtccattgatattaccggtgtggtaaaagaattgcacggccaaggctacaaaggatatgtacggcctgatcacggccgtcatatctggggcgaacaatgccggccgggctatggtttatatgatcgtgccttaggaattatgtacttgagcggactgtgggatgcattctcgtctcatgagaaagaggtgaagggatgagaccgattcatgaacgtttatcaggaagaaccgctgtcataacaggcgggagcggtgttctctgttcagcaatggcaaaggagctttcacggcaggggatgaaaattgcgatcgtcagccggaatgctgataaagcagagcgtgcggcggccgagattgctgatgctggaggaaccgcggtttctgtaccggctgatgtttcagcccgtgattcgctcgaaaaggcaaaagacgagattatcagccggttcggttctgtcaatcttttaattaacggagccgggggaaaccaccctgatgcgatcactgccagtgagacgtatgaagaggatgagcagggcacatcattttttgatatggacgaaacggggttttccagcgtattttcaaccaactttaccggtgcatttctggcatcgcaagtgtttggaaaagacctactgaaggcggaatgtcccgcgattattaatatttcttctatgagtgcgtatacaccgatgacaaaggtgcccgcctacagcgcggccaaggcggcgattcagaattttacgatgtggatggctgttcatttcgcaaaaaaagggctgcgggtgaatgccatcgctccgggtttctttttgacagcgcaaaaccgtgagttgttattacaggaagatggaagtctgacagaccgatccaataagattatggcacatacaccgatgaaacgtttcgggaaaccggaagaccttctgggaacgctcctgtggctttcggatggttcatgctcgggctttgtcaccggggtcaccgttcccgtcgacggaggttttatggcttattccggagtgtgacagaatccatgtccctgtcagattgtaaaccatttacttctgacttatactagtgaaaaatgaaggcagacggggatgagtctatgaaaaccattacaatttctgatgtggcgaaatatgcaaacgtatctaaaagcaccgtatctcaatttttaaatcagcgctatgactatatgagcgagaaaacgaaacaaaaaatagaagcggccattcaagagctgaactatcagccgaatttcgtcgcccgcagcttaaaacagaaatcaacatttacagtaggtgtggtggtggctaatattcttcacactttttccactcaggtcatcagggcggtggaagactattttcatgaacaaggatttcatattattgtctgcaatgcggatgatgaaccggaaaaagaaaagaaatatattgaaatgctgcgggctaagcaggtggacggaattattatttttccgacgggcgaaaatctctctttatatgaaaagatgaaacgtgatacgtttccggtcgtgtttatggacagaaccattgaagaactcgggattccgacagtgatgcttgataaccatcatgcagccggtcttgccgttgaccggtttatcgagagcggcattaagagaattgcgattattacgacgtccattattcgggaaatcagtccgagggtagaaaggattgaagggtataagaaggcgcttgaccgccacggaatgatggtgcgggacgaatatatcaaaacagccgatgcggctgatatttccaatgttttgtcagagctgttctcacttgaggagcctccgaaagcgatattggcggcaaacgatatcgttcttgttgaggtgctgaagtatatgaaggagcatgatatggcaattccggataaggcagccgtcatcggaattgatgaagttccttttgcgggtttttttactcctccaattacgacgatcgtccagcctgcggcagaaatggcgcgaaaagcgggaagccttcttcttcgtcagatacaagaaaaagatggcggtgaaaaacggattcaccgctataaaccggcgctgctcgcaaggcaatccggataaccggtttcattgcataaatcggtttactccggcaatttaaatgtctgaatactatgaaatgagagggggattttatgttctcaaaagatagattccctattattcttcttttattttcagccggggtgattaactatttagaccgctcagcgctgtctattgcagcgccgttcatacagcaggatctcacattgtcggcaacccaaatggggctgattttcagcagtttttctgtcggatacgctgtgtttaactttctcggcggtgttgcatctgaccggtatggggctaaattgacattgtgtacggcgatgatcgtttggtctcttttcagcggagcggttgcgcttgctttcggatttgtaagtctattgattatccgtgttttattcggtatgggggaggggccgctgtcggctgccataagcaaaatggtcaacaattggtttcctccgtctcagcgcgccacggtcattggcctgacaaacagcggcacgccgctcggcggggcgatttccggcccgattgtcgggatgattgctgtggcgttcagctggaaagtttcctttgttctgatcatgatcatcggtttagtctgggcggtcatctggtttaaatttgtcaaagaacggccggcgccgacggaagacgccccggcaatgaaagcggagattcaaccgcatgagcagcatatcccgatgaccttttatttgaaacaaaaaacggttctcttcacggcttttgcctttttcgcttacaattacatcttatttttcttcttaacatggtttccgagctatctggtgaaagaacgcggtttaagtgttgaatttatgagcgtggtgactgttattccctggattcttggatttatcggtttggcggcaggcggaatgatttctgattatgtattcaaaaaaaccgccggaaaaggggttttgttctcacggaaagtcattcttgtcacttgtctgttcgcttccgctgtactgatcggatttgccggacttgttaccactaccgtaagtgccgttattctcgttgctttatcagtcttctttttatatataacgggctctatctattgggcggtgattcatgatgtggttgatcaaaggaatgtcggatcagtcggcggctttatgcattttcttgcaaacacggccggtattatcgggcctgctttaaccggctttatcgcggacaaaagcggatcattctccggggcgtttttgcttgcaggcggattagccgttttggcctcggctgcggtaatccgtttcgtgcgcccgattatcattcaaaccgcttctgaagataataaagacacgataccttattcataagtcatcaaagccactgaggctgtcctgccgataacgggatggccttttcgttctgccgcttgatctgttcctatgataatataggaattgtttacaaaagaagggaagaggaggggacatgaaacagaagccgatatatgtcgaaatcaatattgcatctgatatagaaacgctttgggaatatacgcaaaacccgcatcttcataaggaatgggatctgcggttttctgacattacatatcttcataggctgccagatgaaccgcagagatttctatatgaaacacgaatcggttttgggctgaaggtatccggcacgggcgaatcaataggtgacataaggcttcgctcgtcagaaagagtgtcttcgctcgcttttgcctctgatcatccgctgtcacttataaaagaaggcaggggctactggaagtatatagagcgggataacggacaaaccgcatttttgactcaatatcaatatgaaacggcccgcggtctgccgggaagttggatagaccggtttttatttcgtcctctgctaagctgggctaccgcatggagctttgatgcgttgcggctttggatagaacaaaacagacatcagaagatatcaatccgtttcgggtttgtctatgtctttatgtgtctcgtattcagtctgtattggttttttcaaggctttcatgatggctgtgccgatgcagagatcgtgaggggagcgctggagacagggttaggggtattatggctgcttcccatgcggagaaagtggctgattcacaccgggcagtcagtcttcttttgtgtaacggcactgctatattcgtgcggcggattcgtgatctcattaggagtgcttacgatagccgcaatgattcttaagctcaagctgccgagcgcctggcatacaaaacgaaagagagaagtgaaatgacggattcaatgtatgaaaaagcgattactcattatcaatcactgcacccgatgctgcagaaacggtacagatttgccggatcacgcacgttttgcggagaaggagttatgtcagaaataaagggaggttcttttcttgtcagaatgcttttaaagacaggtgtttttttcagatgttttttctcagagaggggaaacgatatccctttcactatcgaaaacaaaaacaggcaaaatggcgtggaatggaatcgtacctttttctttaaaagcaaaacgcgtttttttgatgcagtcatggaatatgatgagcgggaaaacagaattcttgattacttcggcaaaccccgcatcctactgtctgaactgcatttagaagcgtcttcagaaggagggcttgttattacatccggaaggcagtggctcctgatagtcggaaagaaaatcccgcttccggcatggctgtgcggcagttcaaccgtttatgaggcttatgatgaggaaatgaattgcttcagcataaaggttcatgtgaaaaaccggatactcggcacgcttttctcttaccgggggactttccgggaaacagagggagaaacatgctgaagcgtcatctcatggtaagcgtgatttgctttttgggatttgcggcggctgaagctccgtatatatcagctgctgagacgtttgttttattttccgtactttttttcgttcccgctgtattcgattttgcttttcggccgtcaaagaccttagagaatgtgttattacgaagttatcctgttgccgctttatgtgcggcgcttgcgcttgtcacagacttcagtttttttgccgttgtgtggctcatttatacgcttgggctggcactgtatgctgtccggcggctgatgaaaacaaatattcacagaacagaagagatgtctgttatggcgggtttcatttatttggccgggggcggattctggttcttcgcatatgtccttgagattcccgttatgaatttcggtccgcttatcgttctgctgacggcggtgcactttcactattccgcttttctcattccgatctttaacggattgctcggcaggatcatacgggagaaacgggttctttacagatggagcacggtcattattttgatttcgccgatccttattgccttggggattacattttcaaagacacttgatgtgattgctgtcgctctgtatctggcgggtctgtatgtaaatgcatatctcgtctttacggcgccgtttgttacgaaaacaggcaggatcttgatcaggagttcttcggctgtgttaatgatcacaattgctttttctttgatatattcgtacggtgtctaccgcgaggaggcaacgctcacgatcagccagatgatttggattcacggggccgtcaatgcattcggcgttatcctgccggctttggcggggtggaggttggaaaatccgagaccgtttgatgagggcagcgaaagaacgttcagccgtatttacgggaagagaacgataggcaaagactttttgactgatattcatgcagcaaatgacatccattataccggccttctggatcagatgagagaactgcattctgaagacttttcaactaaaaaactggcgccggccgttatttccttttatgaaaaaacaattgattatgacatcatggcaaaagtgacgtggagcggatggtttcgtccgttcgcgcgcgtgtacgagccgttcagcagaagagcggggcaaattcacctgtccatgaatccggattggtatatcatgcacagtgatattataggagttgactctgacaaagacggcagaaaaaatgtccgtgcgtggatcagaacaaatgaaaagcaggaaaccatttttactgcgctgtattcagcgtacagggcaaaaggggaaggatacatgaatatctctcttccgctgccgtacggccaaatgacgggcattttaaagccttatgcgcgtaagcagaatcttgttttgacaagcagacggcgaaaaagcggagcgggtgatgaagggatttatctgcagacgaaatgggggacgtgtcatcttccgctggcagagacatttcttatttcagcccagagcgaaatcagcctgaaggccgttcatcatatgtggctgttcggactgaaatttttaactgtgcattatcggatcactcatgcttccgcaggtaaccgaagcaaataactagctgcagcgccgcctgttcatcaggcggctttttctcatctacatgggttatattcacctttttatttacgagctattttgcggcggatgacacgaaaggagccatgcgctggatctcatttattctcgtgttagctcagctgtcagggatgagcctgagcggttatgttgtcagtgaatggggatggcacgcagcattttggatcgggagcggcctcggtctttgcctgtctttcatgattcgcgaaatgaaaacgaccgctatgattggcttcacaatggcgagaaagaaatcagcttgttgtcttttcgtttatgactaagcacgcactggctctgctagtgataggaactttagttcgcaggtgcggaaacgggtaacattaaagctgttttacttactcgcagctgtttttatttttatcattccttttaccgtcagcccgatggcgctttatctcgtccaggttttaataggtttttcactcgggcattatttttcctttgctgcttggaatgtcgattgagtctgttccggcagacatgagagcaacatcgacgggggcataccaggcgctttatgcactcggtattttcggaggacctttggccgcaggattttttaatgattggctggggttcagagccggattttatttcgcggggtgctcgggctggcgactgtcatacttgctcatatgtggggagccgatgcgaaaaaatcgtcggaaaagtgcagggaagatgcggcaaagtattaccagacatgatttttttatatgcttgcctaaagaaatgatctcattgcgaataaatttcccttccgtctcaataactaaagtatacttagttattgagacaataattcattccgtcaaatcacattaccaagcacattgatacatagattataaaattaaaaacaagcatttacaggagagaatacctctcaagataaataattaatggattaattgttgtattttggataattatagggtaaattggtagtggaagaacaaacataaggaggggtgatttgatgataaagcttaattcaagaaacgcaacatgagtccaatggcatctttgacaaaattctgactctaacagttcgtagctggcccgtaatagggcacaggaagaaactctcctaaaaataactggcctcaaacatttagacaccacgaaatagctatcaagcttaaaatctaacttcatcaataagaacaaacataaataacccgaaaatggaaggagtatgtttaaatatgaaggtgcattttaagttctggtcaattgcgtttgttttaagtattgttctttatggaattatcgggacaggccaagcacatgccgcccaaaaagacaatgcaaccacagatattacactcgatgctaagaaagaagaggtagcttctcaaataaaaatctataatgaagaaaataatcagattcatccttacacgttgaaggaattaaaagatatgatcaagctacaggaagaaatgccgttggatggctcatttcatgttttatattcaacatatacaagcaaagcctttagtttcaaatataacttttcaattggtggaggaacatacgggaaagcatttaaaaaccctggtactttgttgattaccccgcaagggactgcgaaaaagttctcggtagcagcaaagtatgacaatgggaaaggtggagtagggggccaagcagggaaagtatcattacccggcggatggacaggccagattcatatgaactggactcatttgaaaagaggaaaaagctatcactttaactttattaatgacagcagcagtgatgtaactgtgaaaattaaggaagtaattgtgtggtataactggtaaagaagagcaggccctaaaagggcctgctttaattataggaggctaataagcttcacaggaaacctctgaatacaaaaaaagaaacccttttgccttgtcgggtttcggaacacacagttttttattgctttgtatcatttaaatatttttgatgttccttttccaagacttttctatcctctttaataacttcgattttgtatttctcttttacgtcttcagacaaattgtcatttaaatattctcgcagcttcgtctcgcttttggttttatccattccaattgaaataaccggatctgtttctccgattccgtagctgaccaatccgaatttctcccaagcattgtctaacacttcatctggtgttttttgattaccgtttactgcatatagagcaatactaaacatgaataaagaagaggctacaaccaagattccaactactgtttttttcatctgttcctcctttttcttgaaaagtaaatatatctctcttaatccaaagtatatcataggttattttgatggcaaagtcacaccgtacctcaaaatgttaaagaactgaaacggtgggacgaagaagttgctataatagaagaaagagtacaaagtcatacgttgtttttttattcaattcagataaagtggagttagcaatagatcggcttttcgtagtggcgttcggctcacctccatatctggaaagaagggaggtgagaatatggcagtagaaagcgcacttggattgatgtttcaattcggaatcctcattgtagggattctaacgcttgcctatagtttctcaaacaaaaaaagtaagaacgccccagactcctacatcttggcgttcccactcataaactagacttttggaaaaaagccgactcccttacaggagctattctattgccgatcggagatgttaccagcatcttcgatcttttttattgtatgctctttctgtgtattatattcacaatatcatcagaaaggagaaatataatcatgtaatgcttattgaatctatactgattgtatcttttcgttgaccgaaaatcaaccgcaaagatgtgaagaatacgtttccattaattagaattgtgataaaatattaggtaatgacaaatgaatatgacgcacatctgattgggacttctgaaaaagattatgaaatagtacgcataatttaaaatcaaaattctgaatatttaaagaaaggatgaggaaggtggaaaccaaaaagatagagtttgaaaaggttgcccaaagtcttaatgaatggtatacagttatcaagcaaaacaatatccctaaagcaacagcaatgaggggaaaaattgttaaagcattacctgacatggaagaaaatcagaatgtgttgctgtacttcaatctcatagattcacgatttaaactcatgactgaaaactatagggaatcaggtcatctacttggaaaagcagattatgaaacatgtacagatgacatgattcaatattatttttatctctttaatggcctgtataacttctatcagaaggattttatcgaagcaattaacttttacaaaatcgctgaaagcagactcagcaaagtacccgacgaaatagagagggcagaattccattatcaaactgcgattgcctactatgaaattcgccagaactttttctcgctcaaccatgctgaaaaagcgctagaaagtttcagagcagtcgataattacaccaatcgtgtaatcaaatgcaccatgctctttgccatgaataaagttgacctacagcaatgggagcaagcgatcagtttgtataaaaacgcaatacatatcgctcaaaaagttaaagacgggctttcagaaggtttagggcattttaatctaggtgtatgctatgaaagacaggaacgccttgaattagccaaggaaagctttttaagggctttggatattcctgaacattgcgattccgtctattccattcgctcaatgtacatgttgagtcgtgttttttacaaattaggatcaattgaatcagcgcgggtatggagaagtaaagcacttgcatatgctgataaagtaaacgaagaagtatacagggcaaaattgaacctcatatactttgtatacgatgcgactgatcatgagtcctttgatttgaatatgaatgtactgaaggggaaaaacttgtggtcggatgtcgctgacctgtctctaaatgcagcattgtattacaaaaagcaggaaaacgctgatctgtcatctaaatactttgaggaagcttgtactgctaaggatcaaataataaagtttacggaggcgttgtcatgaaaaaacgtactgttttaattactgctgctattctcggactgcttcttgtgtcaggaaatgattataggacaaaagaaaacggatggctcggcatatcaaatggtttccaaacagccgaaaatggagcactgggataagaagaaaaacggataaaaagatcgctgataaaagtattttaagccggccaaagtgccggttttttaatgagagaatgtcagctgccaacctttatgttaaaagccttaattaagggcttattttttggacactgatgagtgaaaactgcgaacatgaaaggagagcttatatatgagtgcatctaaagagctttatgcttctatgggatggagtgagccgaaaaagaaagaagacccaatttttaaagtcggccaacggtttacaataaattacggatttcaaaaaaacctgaaaggcacttgggaaatcataaatgacagtgactctccacactatgaatgtgttaaaattttaaaaaacggcaagctttcaaaaggggaaaacttaaactgcaaaagacactttgatgtatcattcataaaacaagcactcgaacattcaaaactttaaacaagcataagaggagagaaaaacaatgattcaagaacaaaggtacattaaacgagttatatggtgagggaaaatactagtttgaatacatcgcacaaggcaaagatgcttgtttatgcttggtatcagctcaaaatcgatttgagctagttcggctgcataatcaaaaggcggaaataaaagttagcatagatgccaaattcaatcctgagaaaatcaggacagatatcaagttagttattgttttcactccatatgtttttgattgcctaaaagggacgttgtactctttacaatatttatttgcttgttggcttcctgcatgtctttcagtgaaaggcgtaataactataacagcatcacttttccttacagcagaactaatcttcactccactttcatcacctcttaataattgatgattgatgccagctgaaccgaataattttttaaaattttcctgtgtttcggttgcgcccattattgtcacagttttatcctttagtctcccctcaaaaggatctgaagcagcagtctgttcagcagattctttctttgcagatcttgaagacgaagaagggctggtgacaaacgaaagcgaagaatggttatgattatgtctccatacaatctgtaatttcttttcagacataagataggctacatctacgattgaaccctcagtcaaattaaatttttcttttgtgtaatcgttaataaatagggatttctcctgaccgtctatgtgaatagggccatccaaagcgctttgttgtacaattagttgattattcacagcttctacaatgcagtatctaaattctcttctatctggttcaattccatctatattgatttttttgtaaagcgaaaaatcatatcttccatcaacctctgcaggatcaacttgaatgatatcacctgaagctatttcaagatcccgaattacggtttctggaataaacaaagaggggcgtgactctgaaagtgattgaagttctccgccaactgcttttctttgaaattcataaagtgattggttaactatttcatctttttcattagttgagctttgatcgttttcgacagataatgtttcctcgacagtctgactctcaggatcagggtctttattttctaacggctgaatcctttgtaatatatcaagcaactctaatctttcctcaatcatttgttttgattgggaaaagttatgcttgtctaactcttcagctatgcatttcacttcactttgaacaaaattaaagagttccttatacataaaagcacctcagtttatgattatacttatatcatataggaagttgatttaaccctcaaatagctataagacacggtttgggaagaggagaaggttttgggctattacgattaaacctcttgtattctatcagtacatgttaacaagaattatgagtctatcaagctctgatttgtccattatctatatccattttccgaataaatgcaaatatattgtaagattaattaagattctcattgtaaacactttcttaatatggtaattttgatttgtaataccaaataaaccctaatcagaaggagagatttcattgaaaaagaaggttcttgcttcaattgtattaggtataggttttctaggaggacaagctgcttttgccagtcagtcgaacgatgtcaatcatggggaagttaatctggacgaatcaagagatttaatgagcgccatgaagcttactaaatcaacaccgggcgggggtacttggtatcatggcttcgaaaaaggccaagttcattccaattacaatcataagaaaaagactcacaaatcaagtgctgcggctggagcaagattctatgaatctaaatggaagaaaaaagatgaagggtatacctacgctgccgtgtatcaaaccctttttggaaacaaggctttttgggatacaaaataaagaaaacgatagcaaagtgattttttaatttttcttccggtgtggtcaaacttgaatacaagacagcaccggatttctttttatggaggctgtccaatgaagaaaacaatctacatattgttcattctggttttgctctcaatgaatatgtcaagctatcattacactcttaacaaacaaatctattacactttattctccaataaagaagcattgataatcgattatacctcagaaattaaaagtgaggactttataaagagattggtcgccttctccaaagaaaacaaagtgaatatttctcaatacaatttcttagatgagaagagcttaaacatctattctacaaaccctaaaaatgaaccatcaatacataacggcaataagcttgtgtcaaattttctaagagatcattcaaatcagaagatgatcggcagcatttcttttccactctcgacatggaaaatcagatattttgattttaaccaaataaagaatataggcataggaagcaaattttatatttcatctaacgatgaaaaggtattggaaaaagcacaaaacctttttgctgactatggtgaagtaagttttgaaaacatcactgagaatactgcttttatgtttaacaaaactttgcttatgctagtgttgctttctatgctgattttgtttattggtgtcctttattttgtaattaaaaatcgcaaacggcttctgctgcaaaagttatgggggtattccaaggttaaaacactgctttcttacccagcaatgtttttgaagcctctaattataatcatattttgcggtgcaattattgtggctttgctaacctttcctttcagtttaaatgactggctggctgcatatcttagaatttacattaggaacgcggtgattggtgcgcttatcatgatggtatacaccatcattgttaccctaatcttgtttaacaacagcgacattagtggttcgatcaaaggcagcacaccgattaaaaaattccaatggttatctgtaggctttaaaattgttgtcacgatattgcttttcaatattgttgcgttttcactttctaacttattcgatctcaaacagcagcttgataatcaatcgtattggaaaaagacacaaaacacttataaaacaagctttgcaaataccggcatcgactatggtgatttaaaattagacagggagaaaaatgttagagttcgcgcgttgtatcatcaattagagaagcataaaaatgcgtttgtcattgatgcacaaaactatggtttactaagaaaagacgggaaaaaacctgtttatttttacaccttaaatacgacaaagaaaaatgaaatttattccccttctggacgcagcattacaatcagccctaattatttaaaggtgaatcccattgtcggtgctaatggggaagccataagcagaaaggaattaaggcttgattcaaatacattgaacctgctcgtaccacaaaagtatgaaaaatatcaagaaaacatcatagaagcatacagggatcatttcttctttgaaaaagttgaattagataatatgtataacaaggagattaagcaacctctaaacacacttaaaaaagatgaattgaaaatcaacatcatttatactaaaaataggcaggagtatttcacctttaatagtcaacttggtgatgccggcaataagaataacattgttgatccaatagctgctgttttcacagataacgttgatccatctgttataggtgcttactcaacctcatgtttattcttttcagattcttcaaaaggcatggcgtatgatcgcatagttccttatttggagaagaccaatacgagagatctaattgattcatctatttcggtttatcaagaattaagcgacaatatagcaagaattcagaatcaattcttacagaatttaattggcctaacaataacggttatcctgtccgcagcctttcttgtcgcttatatttggtcgtattacagcgcaaatgcatatcggctgtaccttaaagagctttttggatattcatattgggccagaaataaaaatttaatcatcttttcccttttaaccaattgccttataggtttaggatgcagtatttattacaaaatctttgaattaacaattttcatcgcgctgtttattgtaatcgagctgcttattctttattttctgagtgtctatttaaacaggaaaaacatgaataagatcttaaaaggagatagaatatgattacactcaacaacatatcaaagacttttgatgaaaaatctgttctttcgaatttctctcttcagataaaagaaaatgaatttgtttcaattgttggtaagagcggttcagggaagacaacccttctaaatataataggccttcttgatactccatactcaggagatattgagattttaggctttcgaaaccctaaacctaacgacgtgatgaaactacggagagagaacttagggtatatctttcaaaattatgtgcttatggacaatgaaacagtattaacaaatttacaactttcgacggcttatgcaaaagacttcaagaaagaaaagttgacagaagctttagaaatggttggtctggataaaagctttttaaagaaaaaggtttatcaactgagtggcggagagcaacaacgtgtggccatcgcaagaattattttgaagccttgtgatattatcctggctgatgaaccgacaggaaacttagacgaatataacaaaagcattattttgtctttattccatcagttaaaaggcatggggaaaacgattatttgtgttacacatgatcaagaaatcgccaatgggtctgacagagttattaatctttcataaggagaggtttaaattgaaacactttacttttgcgttatcagcaagcatcctggtcattattaccggggtggtacacagaataatttttagaatgtttggtttaccttttgatcaagcagtaatcttctggggcggatttgtagttgtttattttgtactagctctgctttcttctttactctttaggaatttaggttcaaacagcagaaattacgaggcttaataaaggctttaatgcttcctcacgaagtatcaagaagggtacatgttgttctagaagaaaggaccggccaacacgccggtttttttatgtaagcatatttgcaaaaagaatcgccataattttgtatttttcccgaaaataatactctcatctacaaaatattacaaatttccctcttgcaaggtgataaaatcagattgcctgctaagtgagtaagcagcaggcaacaaatcaaaagggggcaataaaaatgttaaaaagtaaattcaagaagatagcaggagctacagcactggtgggggccttgctagtatctggagtacaagcggctgatgcagcaactaaaccaggaaatttaatcccaattcgaaacaaacaatttgatgataaggttgaagaatacagatggcttggtaatgatactgttagaattttctttagagacagtgaaggaaaatattattgggaagattttgagtgtgtaactacagaaggcggagtttgttacgtatatgaatgaagaagtcttattcatagtatatagcgaagataaatcgtaataagtcctattttttctcattttgtctcaatatctaagtatacttaggataatgagacaaaattttttattcactattcaacttcctagaatatatattatgtaaactagaaattgtgaagagaatataaaagtggatccatattctaagaacatcccctttttgtaaggtaatattaaaaaacctctacgtccttaataaattaaattggtcataaaggtttttcagtttgagtattttaatcggttatgtcacttgttgccggtcttcttgatcaagtccacgccatcgtatgccagactttccacacttgcagccttctgcagtatgtaatgatcaaaaaagttcttcgtatagtctgtaacaagatttcgcatctccatggcatcccgttcgcctctaagttcctcattcacactggtaaacacgatgtcgcagtaatctaaatgcgcagcacgatcaacagagaaataataggtatccatgctattgttagcgccaatgatcgcattcatgttatagttcggttcagaaaacagcagcaaaaagggtttcttaatgtcgctgccctgaaggccgaacgctccgctatccaagccaatcccgcaggcgaaccggtcgtcgtccccgcaaaacatcgccgtcgtaggccctccataagaatgtccgactatgcccatgccgatgtcaagcaacaatctgcccttaaagatggaattcagctctccagaatccaatttgacaagataatcggctacataccttacatcttctgcctgtaattcactatactctgttaacttgtcaagtatcggcagtgtaagcacgttttgacacatctcaatggcagtttcatcgtcgggccgcatctccatcttaccagccaaagccagcatctccggatcttcagaaaacgccataatgacatccgaaaaatcctttgatacattaaacaggcgcccatctttacgcttatacatcgtgctattttgatggccgatgcttactacaacatatcccatgcttgccaagtctgtacagatcactgtaccccattctggagaaccgcccccgccgcaaacatagaataacaccggatagcgtttttccttcccggagagagcaaggtcgtcgtaacattgggtcttgatatctatagagtaagcatccttcaacgcagtgagaagcggctgctcatcaagcatttcgcagacttcaggaaacatgtacgctgatgtagtcttcccttcgctgctgtcggacggatagtacacaaacgccgtcagttctctttttgtatgatctgatgccgtgtactcaaaatccatctgggttcggccgacagtatagccgccaattggctctggaaatgcgtcatactttttcattctcttgttcccccttacgtaataaaagtggcggatgtgaaatacacacattgcgctataaacgcttttcaaaactgtgaaacgattacatcatatgttcagtgaatcatagctactccttggctttcttgagattgctaacaacatttgtacaggcccatatactgtttcagagtttcatccgccacgtaaacctccttgtattgctgtttaagatgataaaagcggacatcgttgctgatgtccgcctaaagcttaactaattgggttctgttccccaaatcagttttccttgatgatataatgtgatttttttcgttgttttaaacgtatttgattggaaaaaggaataatcgtcgctttgtgcataattgctccagtcatcgttgtgaagacgaagctgaatattccctgtgcttgctcccggtgacagtgttccttttttaaaccccagttccagataggtatctgcgccttgcataggtttatgcagcgtcacaaacttgtgggtcagattgccgcatcccatctgcgcgtagtcacagtcaacgttttggcctttgtttttcgcgttataccagtaacgggcagtgacatcttttaaatcaaccgtcgcattgccattattttttatgtgaagctgcgggcggatttgattgctgttcacacgcccatcccctgctttgtattgtacagaaacgcctttttcctgtgtggggttatcttgtgctggcgtttcagggccgtccttcgttgaatctttagtaccgcgaatgttttctcttacgaatgttcctgaagcagttaaatctgtaagcggccagccgcctgttttagatgctcccggctttaaagccgaagatgattcctgcttatcagaaagattccagttcacccagctgatgttcttgctgtcgagataattcagccattcccgcgactggtctaggaatacaccgccatttccagacgcatcgcttgttcccgattccgtcacgaaaataggcgctcctttgctgagtgcgtagtttgctttatcccgtaaaaattggccgtgtgtgccggcataaaaatgaagcgcgtacatgacgtttgcatcttttaactggtcatcggcagcatcattcacatcctggctccatgtaccggttccgacaatgatgatgttgtctggatcatttttgcggataacggaaatcacttcttccgcatacggtttaatatcacgcttccagttcacgtcaccgtttggttcgtttgcaatttcataaatgacgtttggcgtgtttccgtaaagacttgacatctccttgaaaaattcttttgccttctctttattttggtttgggttgccgtcatttaaaatatgccagtcaatgatgacatatatcccaagttcttttgccgcttcaaccgcttcttttactttatttttcacggacgggttgtcaatataaccgccatctgccgtatacatcgccgcgcggaaaacggttatgccccaatcgtctctcagccattttaagctgtctttattgacgaaatcgccataccattgcaatccatgtgaactgatccctttcagttgtaccgctttaccgtctcggtttacgagctgtgtaccttttatgctaagctgaccattcttggctactggcgtttttgtctctgctgctgatgccggcgaaggcagcaagccgcccattgtcaataccgcaatcaataaacacgtaataaaaatagaaattgaccgtttcatatctgatcttttcctccttcgcatcattttggctctttcttatgagctcgaactcattgtaaaaatctttctcatgattgtctatcaacctaatttcttgtttttgggaggtgtaaaagcctgtcaatttgctctatctctattgaataagacacacctgacacatatagaacaaagaaaaccaggctgaatcgggactttacacgtcatttttcaatcgaatcgaaaaattaaatgtatttccaacgtagacacgctgaatgtgatgagtctcaatatggcattgaatcttatgattgctgtaagaagacgagtccttgttaatttaaggttgatgtaaggttcggattaatacgggttaaggttcgagttgtacaataaggttgtacttcagtgagggattcagccagaagaattcccccttcaataaatcatagaggtgaaaaggtttgagagaaaataaaatgttgtcttcattatgttacttcagtatattttttgcgccgtttctgtttccgattatcgtctatttcttaggccaggacgatgtgaaatatcatgcgaaaaaatctttgtggacgcatctgattccttatttgatttttggtattggcatcatcgcttcaggtttacttggtatgaatgatatcagacatgccgggcctttcctgcttgcgacgtatgctgttacattccttgtggcgatctattttttcatttggaacattgtcaaaggaatcaaagtgttttcggaacaataggaaaaaacggttctgttattaatcagcagaaccgtttttttgtatagccattatgataattgtatatctatcgttgtcccttctcccgcggtgctgtgaatggtgatgtcccctccgtgcttttggataatatcctttgctatggccattccaagaccagagcctgcatgcgtcgttcctgtatttgtgcccctgtaatagcgatcaaacactttttccagctcctcttcttctatccctttgccgttgtccttaattgtcacatgggtccgttctttttgttcaagccgtacaacgatcttcacatcaggatcattgtgaacgagggcatttaaaatgagattcgtgaccgctctcctaatcaatatcgcatcaaggttcagcatcagcttttccacgttcgtttgaagttcaatggacttatccgcatatctagaatcgtttaacatatcaattaacgtttcccgcagcagcgatacaaggtttacccgttctgtatgtaacatcacatcgttgtttttcagccttgtcgttaaatttaaatcttccatcacatctttcatatagagggatttactctcaatgatctgggcgtactctctgacctgttcggctgtgagatggtaatttggatctttgatgatttctgcatagccttgaatagatgctaatggtgttttaatgtcatgagaaatatgactgatccactcttcacgcatttgctctaatttgtctttttcttttttgcttgaagatagttgttccgataagtgattgacattatagaagacatctttataaatgcctttggatttcattttgatcgtataatctccattagctaaccgctggattccttgaatgacacggccgagcggttttgtgagctgccggctgaatagatagccaatgagtaacgcgatcaatgcatctattgataataatatgatggttcctgcattgaacttcgtcacaaattccttggtatcatatgagaggacaaatttcccgagagagggatttttaaaccctataaagtaactgtactccttgccgtttactttttttccgccggcgtaaatggttgataataatcgttcatccttgtatttatgtaaatttacaatttcaataggcgtatattttttcttcagtcctttaggttctctatcatgataaacatcctgtccgttttcatctaatatttgaatccatgcattctgctcttttaaagctttttggccctctttgtttattgtgataccattgttcgataacgtgacatattgtcggaatgatcttgtgaaagtttccggtgtactttcttcgtcatgttggctgttcgcctggaaaacgagccaaaacataaaaataaataaattaatgaagactgtaatgatggtcacgataatgacagagaccatatatctgcctgttaatcgccaattcatccttacgcatcctttacaacaaatttgtagcctaaccctttcacagtgacgagaaagtctggttttgatggggtgttttctattttctcacggagcctgcgtatatgaaccatcaccgtgttgtcagaaccgaagaaatcttctccccatacagcttgatagagtgtttctttactgatcacccgattgggatgctgcagaaaataggtcataagcataagttctttaggtgttaactcaatagccgctccatttttggtgagctcggcttgttgttggtttaattcaaatggccctttttttattacggttccggtttgagaaggctgtaagtaagagacccgtctcagctgcgctttgacccggtatgcgacttctttagggctgaagggttttgtaatgtagtcgtccccgccgatggcaagtcctacaactttatccgtttcctccccctttgcagacaaaaagataataggaacgtgtgaaatgtctcttatttgcttgcagatatcatagccttcaccgtctggcagcatgatatccaatatcaccagatcgggattttcttgatgaaattgagccaatccgtcacgggcagtcgaagcggtcactacgcgatcaatgccttctcttattaatacggttttgatcagttccaaaatttctttttcgtcgtctatgattaatactttgctgtgaagccgtgacatatattgatcactccttgaagtcattgtcattattatacccaatgtctgtgtatcgttaaaaaaatcaacacttctctcccacagaaaaaagccaattttctttttcaagtaagaaaattggcttattgcgatgctgacgcctttaacgctttacaacaaatgttgtcacgctttgagccggaagatgggcccaaaaatgattgtccgttactttgagatccgttccaggttgaagattgctgctgctgctcgtgatccatctggatacttgcgaagcagttccattctgcaacacaaagttttggttgacccctgtgttatttttattaatggcaacaatcacgactttattgtctcctttataggctgacacgtaaacattcggttcaggatttttcgttgcatcaatccttacatagcctgggcgcacaaattttgagaaatgagccatattgtatccgcgtttgctgatcatcccatcttctttcatagggccgtatgatctgcggatgtaccaccacacataagcttgaaaatctccctctaccattgaatgatgaatatgctctgaaacacctaaagcctcaggccagcgatccgctgaattgttgtcactattcggatagtatacctccgtcatccatagctctttccctcctcctttttgtttgaaaagaggataaggaaactgactgacctgagtgccgtacaggtgggttccgaggatatccatattcctaagcgcctgcggatcgttcaaaatggggtctgatatatttttcaggtattgaaatgattctggcgcaatcacgcgggcattaatggaaccggcattctctctcatgaaacgcaggatttcttggggcgtccaccatgtccattcgtgagcgtaatcaggctcgttttgcatagaaatcccatacagattcacaccattactcttcatgaaattaacgaaatcgttaagatgctgcgcgtatgcggcgtacttatcgtatctcagccgcttagctgttgtgtcaccattatgattgaaagtctcaaccatatcgtttggcggattccaaggggaagcaaaaacgattgctccatgtttgatcgcactctttgcagtctccacttccttgtaccaattatttctattttcatctacatgaattcttaagatcgaaaaacctaactgattctgtccattgccaaaagcggtctcccgttgagccgcagtcaagtctccaatccaagccgggtggttcattcctccaaaaccgcgaatcacttgtctttctgcagatatattaactgttgcatcacttgctgctgaaacttcagtaactcccggtcctaagagcatgacggacagcattgtgaaacataccaataatacacaaattgttttttttacgctcgacatcattttttcctctccttcatatgtcgtttatggacttagaaaacgtacctttgtctccctttgcttatctttgtgtaaactgccagtaatcaaaattaaacaagtttcctgtaccagttccgctaaatacaaagaatacgttgtgaacaccggatgcgccgcttaccgcagtttctatttctctccaggattgcgttccgcctgtggaagggacattcaaggttccgacaagcttaccgtttgcactgtctagccgcacttctattttcccgccaagagcggacgctacatttgctttaaacgttctggcgccgcctgatccgaagtctgcatttccaacagcaatccagtctccgttatgaatgtttgtgacatgttgattattgaacggcccgccgggtgctgaggatgcctctgtcaaaatccgtccgttccaggcaaacgtttccgcttctacccggttatatggattcaagttggatagctgtttgacacctgcaaaatttgccgctacctcttgcagagagccatctggattatgcacaagcttattaatatggggagaacggtatcctttgccggccccgtaaagagcggagctgacagtttgagtatgatacaccacataccactcgtttttaaaattgaaaacagcatggtgattgttcccgccgcctccgaaaaatgctcccggatttttcagaaagtgccctctatacgaaaaagaatccatagggcttgagctggtcatatagccgatctcacctggaggtttatcggccgggtgcgcgcccccgaaattgatacaataggaatagtaatattttccgttatacttatgcattcccgaatcttcaaacataaaaggcgcatcaatcgtagatgcacttccggcaacactggtcatatcaggccctaatttcatgactcttgctgttttaggattggcccattgcccctgtgtgggatttgaaccgccgggaacgcctccgccggcatataggtaaccggtaccgtcatcatctacgaatactgccggatcaaaaagccatacaacaccggacattcctggcgtatttggcgttaccagcgcttttccgatcggatctgtccatgggccggtcgggctgtctgcggtgagaaccccgatacctccgccgccgtttgcgaaataaaggaaaaatttatccttaccattgatctttttcaccgcggctgacggggcccatgatgctcctgcccatttggcaatcccccggccgccattcagcccattggcacccgctgcgggaatcgctccgtgatctgtccagttcaccatatccgctgaagatatgacggatattttattcaaattggcaaatgaattatccttaatcgttccgtcgctattatattcatagtcatcgcttgacatatagatgtagactcttccgttataggtcagcgcaaacggatctgcgcccagatgatggtcgataagcggatttgaattcccggcatgttttgcaattggagtgcttaccgcattcgcatattccccaggtaaacagctcaataataaagcaagaatcaataaacatacgctgtactttttcatcagcttaacatcctcctgtttccgcatattaggtttgtaaaaaatatgataacaacaggtcatgaagaatgcgtaaaatgaatgatttttagagtgaaaacgttgcaaatatctgaccctcttttatgagaaatgccgccgattacagtcagcggcattttgccctggatcatttacattttgtcaaacttcgtgtcgccagcaaacgatcctattgacagttgttcttcaagaacaagtccgtgatgatgccgttcttcaatccttttaataatagatcgaattgtatccgtattttcttcaatattgtgagggtcaaagatcgtcacatggtctccttttaatttgtactcaaggtaatgctgtgcggttgattgcttccatcctctatcggtcaactcgccgcatagaaaatgatgaatgttggcgttcaccgcgccggaattaatcagtttattgtgatatgtgagatagcttctgattttatccttaatggaaggaatggttaataattctctataataatccggaatgatatccagattccgatgaatgatctcttcggtttcctcttccgaaaaataattcaccgaaacggctcttttagaatcaagcatcataatgtccgatacgatgcgtccgcgcttctccaaggctttggcaacctcaaaagccaaattcgaccccgaggagtaaccgagtaaaacaaagggcccttgttcctgaatgcctatcatgctttctgcataccggtcaacgatctcttgctcgtaagacggctcttctaggaaatcagcggcatagacggtgcagcggccgtcaagtcttttcgccatttcattatagaccagcccgtacccgattaaaggcgggaaacagaacacagggattgaaccgttctgattcatcttgacgaatacgttatccgtcttggactcgaaaactgccgcttgaatggcgcgtgccattgtttcgatggtaggaaaatcgtatacggcttgataatgcattttgattcccatacggtcgttgatttgatgaattacttgcaatactttgagcgaatggccgccaacgtcaaagaagttatctttaattcccgggtcgctgagagctaaaatgttcttccatatctcggccagctgcttttcaattaacgttccgggcgctttgtattcggttccggtaagtctatttccctcaggagccggcaaagcttttcgatcgatttttccatttgcggttatcggcatcttctccatttggacaaagtaagccggtatcatataagcgggcagtttattcagcaaatggcgcttcagctgcgccgtatttaatgaatcgtctcctgacaagtaggcgcacagctgctttgagccctcttcttcaattgcgatgacgaccgcttctttgacagattccagttgcaataaagccgcttcgacctcgccaatttcaatccgatagccccggatttttacctgatgatcaattcttcccaaatactcgatattgccgtcaggcagccaccgggcgacatctcccgttttgtacattttttcgcctgcggcaaacgggtgttcaacaaatttctcagccgttaattccgggtggttcaaatatcctctggccagtccctctcctgccacatagagttcgcccggtatgcccattacctgaatgtgctgatattcgtccaaaatatacgcttgcagagtaggaataggttgtccgatgttgcttctgccctcgtcgatttcccgttccgtgatttctttatatgtgacatgaacggtggtctcggtgatgccgtacatattgattaattgggttaaaggatatttaagcttccagtctttcaagaaggatggatttaacgcctctccgccaaatatgatttttcggatgtttaaattggattcgggatctgctctctcctcctgcatcagttgatagaaataactcggcgtttgatttaaaatagtcacagctttcgattttaacaattgcaaatacctttccgggttttttgctatttgtttcggaacaatcactaatttgcccccatacagcagcgctccgtacatttcccatactgaaaagtcaaagcagaaggaatgaaacaaagtccatgtgtccgatgcattaaaatcaaaaacatttttgttgttaaataacagacgaaccacgtttttatgttcaatgagcgtgcctttcggattccccgttgttcctgatgtataaataacgtaggctaaatgatttggcatcacgttcagattgagattagatgcttcggcgccgtatgatgacggatcgtcaaggaagacagtatgactttgataatcggtaccttccagaagatgatgctgcaataataagatagagacgttagaatcctcaagcatataatggatgcgttctttcggataatccggatcgatcggtacgtaaacgcccccggctttcaaaatagcaaggatgcctatcaccatctccggtgaacgttcggccataatgccgacaagctcctcggcctgaagtcctttggcaaccaaggttcgggccagctgattggcgcgttcatttactacccgatacgtcagctccttatcttcaaaaacaatcgccgcttgctccggcgttcgctccgcttgttcttcaaacaattgatgaatcgtcttttcctttggatactcagccgccgtatcgttgaacttatctatcaggagcgatcgctcatccgctgttacgatatcaaggtcttgaacgcgaatttcctgatcgtccgccatttgcttcatgatttgcatgaaatgcgtctgcatccgttcgacacttgcttggtcataaacatcgcgattgtatacaaaacgaatgtcaatttctccatccggcatcactataaaagtaaagtcgtaatgagtatgttcttccatatgaaaatcgagaatgtctaatgcgttgtcatcctgcttcatatgttctatttgtttctcaaccgggtaattctcaaataccataatatgattgatcaactgttgcttttgctcagtttgagcctgaatgtcatacaacggaaatgtatcatattcttgagaagccagtgcccgctcctggttcattttcaatacttgtgcagctgtcatttcaggctgcgtatgaatacgtacgggaatggtattgataaataaaccgaccatggtttcaattcccggaatttctgccggtctgccggatacgaccgtgccgaagacgacatcctgactcccgttgtatctttgcagcaataagccccatgcggtttgtatccatgtattgacggtgacttgctggcggcttgcggcccgttttatttcgtctgtgagccgctttcctaaacgaaactcatgctcacctttttcgtatcctttcgcccggtcggaagattgttcttgtaacaaaacagtctgcccttcataaccttctaaatagttacgccaataggctgacgcctgcttgtgatcttgttgatccagccattcgatatatcggctgtatggagtgacggctccccgcttcggctgcctttgctcgagtatcgcataataggtttcaaacacttctttcgtaacaagaggcaaacaccagccgtccattaaaatatgatgaaagctccatatcaaccgcgcttggtcttcctctgtccgcaggatcgatacgcgcattaaagcatcccgggtgagattgaatccccgcgccttatctcttcttgcaaaatcggcaataaactcgctgcgctgatgactgttcatgctgcgaatatcttcaacggccgtttcaatcggcttttgccggaatacaatctgcaaaggctgatctttccattctgtataaaaaagagtccgaagaatgtcatattttccggccagatgcgccaaactcatcctgaatgcatcgatatccaagaaacctttcagatcaaaggcggcttgttcaaagtaagcttcggaagctgaatcgatcaagctgtggaacaacattcctttctgcatgggggttaatgggtatatattttcaatgtcaccgagatgattcgtttgctgtacaaattgatccagttcaccgatcgttataccttttaacgaaatatcgcttggcgtcaggtgaatttgatcttgagcatcacaatgtgcgatgacttgctgcaggctgctttttaagagtgcggcacaggcttccattgtttctctttgatattgtttaccgcaatagctgatggccagcgacaatcggccgtctgaaatcatgccgttgatatcaagtgtataggtcaagggacgattgtcactggctgttttcccgcttgagtaaggggatacctccatcttgccgttccggacatcttgatcaaattgacccaaataattgaaacgtatttccggatgtccggtccattcatgtgccttcgggtgatcggacaaatatttgatcaggccgtaacctattcctttttgggggatctgacgcaaattttctttcactgttttaatccgctgctggatatcttgatcagctttgatttgaagcgaaaccggatataggcttgtgaaccatcccaccgtacgcgaaatatcgagatccggaatgatagactctctgccgtgtccttcaagatcaatgagaatgtcttcacatccggaccaacgatgaatagcagttcccagaccggtcagtaataaatcgttcatatcggtcgaataagcccggtgagcgttttttaataaacgttcggtttcctcaacggtccattgaacgatgaccgtttccttgtctttggccagaccggtctcctgttcattgtcctttggcaatgtatgctgcggattatgtttctgtctgaaccagtattgattttccgcttcgaattcctgactttctgcataacgattcaactgttcagcccataacaggtaagagtccgttttcttcggaagccggatcgcttcgccattttgaagctgctcataagctgctgctatatcctcaagtaaaatcctccacgatacgccgtcgatgaccagatgatgaaccgcaatcagcaaatgatctccctcttgacatcggaacaatcccagtttcatgagcggcccttcggctaaatgaatggattgctgaatctcattggaaatggtttctatcgtctgggacacatttttttcttcgcgtaatgagatcacttcaaggctgaacagatcaccttcatcgatcccgcgatttcgggcttcatgtccatcttctgtcggaacatagaccatgcgtaaagcatcgtgatgctctgtgatcttcttcatgacgtcccgaagctttgattcatccagtccctctttccaataaagcataattgcttgattataatggtgtaattccgggtatttctggtcaaaaaaccaatgctgaatcggtgtcagcagcgcccggcctttgatttctccttgttctgcgattcgggttaccggctctacgtatggaacaagctcggagatcgttgggtatttaaacaagtgtttgatttcaaacttatacccggcttggtataatcttgaggacacttgaatcgacttaatggaatcgccccccaattcgaagaaatgatctgagattccgacccgttctaagcctaagaccgactcccacaccgcggccagtattttttccagttctgttcgaggagcttcatagttcatgcctgtaagattctctcttggagaaggaagggatttacggtctattttcccgttgaaagtaagcggcatctcttccagctgaacgaaataagcaggtatcatataggatggaagccgccgggacagctcttcacggagctcgcctgcagttaaagcatgttgtgcagtataataggcgcacaaggatgtttccccatcgatttcccgggcgataacgatggcttctttgatcgccggcagctgaaaaaaagcgccttcgacttcgccgatttcaatgcggtaaccgcggattttcacctggtgatcaatccggcccaaatactcgatattgccgtccggcagccatcttgccaagtctcccgtccggtatatccgttctcctgatgcaatcggatggtttacaaacttctcggccgtcagttcgggacgattcaagtagccccttgcaagcccatcgcccgctatgcacagttctcccgccacaccggtcggctgcatatgttccaaatcagcatgtaatatatacaattgaatgttggaaatcggtttgcctatcggaatcgatgcatatgtttcttccgtctggcaatcaaagtatgatacatcaattgttgcctcagtcggtccgtacaagttgatgatttgagcctggctcaccgatgtgatgatgcgtttaaagcctgcgacatgtacaggcttcaaagcctctccgcttgcaaacacatgtcttaatgacgctaatttttgtttcaacatcccgcttggcttctgatccatggattccaggaaggcatgcagcatcgccggtacaaaatgcattgtgctgacacctttttgtgcaattgtatctaaaatcagctcgggattcttttctcctccgtttggcaacagaaccaatctggaacctgatatcgtccaccagaacagttcccacactgatacatcaaagatgatcgcagttttttgcagaatcgcatcccgctcatcgagagggtatttttcctgcatccacaccagccgattgatgaccgaccggtgctcaaccataacccctttcggcttacccgttgaacccgatgtataaataacataggccagatgatccggaccagcagccggctctacattcgacccgtcttcacaaaagttttgcggatctttcatatccagcacttttcccgtaaaaggtactctctctcgcgattgattctgcacgagtaacaacttcgtatccgaatcctccaatatgtatcgaacccgttcctccggatagcccgggtcaatcggtacatacgccccgccggctttcaagatcccgaagatccctacaatcatatccagggagcgttcggccataatcccgaccggctgatccggctgcacgccctcagattgcagtgtccgagcgagttgattcgccctttcattcaattcccggtacgtcagacggctatcctcgtagacaacagccgtttgatcaggggtacgttccgcttgttcctccaaaaattgatgaatcgttttttcttttggatactctgcagccgtttgattataggcgatgagttgatttgtctctgagtctgacagaatattaagctgtcggatcataaggtcgggttggaataacaaaatcgaaaaaatccggtttacatgttccatcacttgcatcatatactggcgatcataagcttgttcattataagttaactttaaatgaatcgaatcattttctatagaaaactgaaataacgtatcagcagcagccgtttctataaaacgaatggggtgaagctgatctagtgatacgatcgtgtgaatcattggcaaatgatttgaatcgtagttcagatttaatggaccggccattttatcgaaaggaacgtgctgatgtaagatggctccgttcagcgtatgcttgaattcattaaatatggatttaaacgtgccgtccgcatttatgttttgtttgattaacatgacttgatctaaacgaaggtcttcatcggtttcgtcttcaaaggtcggtacacctacaataacgccctcttcccccgtatatttgtacaaaagacactcgattccgaccaggagaaccatataaacggccattggcgatttattcgtcatcttcatgatgcgcagggatacatcggagctcaatgaactgtgaatacggttgggtgcactcggcgcctcgtgctctattgttgagtccgacatttgaaacgaagggattgcactgggacgatcttccgcatcgaacatgctgctccagaacaactcctgttgcttaaattctgacattaatatccctccagtaagttttagccggctgaccgctgtccccgtaaaaacatcatgccggggacagccaataccggccgtttttagaaattcaattcgatttcgcttgcaaagtgttcacttttgtttactttctcacttaattgaatttcttttaaaggaatcgatgggtcttttatgatcgccgacagaatcatggcgtaatccttgctcagcgtagcgatggttttctgtttaaacagcttcgtgcagtactcaaagcttccttgaatctcgtgcggtttcatcacaaaggtcagctgcaaatcaaatttggccgccgtatttgtttgttcatatggtctgaccgcgagagagtctaattcgatatccgtttgttccgtattttgcagaacaaacatcgtatcaaataacggattacggcttaagtcccgtttcactcccaatttctcaactaattcttcaaaaggatattcttgattttcataagctttcagcatcgtttcttttgtttccgttacatagtccataaaggtcttttctccagccggtgccgtacggatggccagcgtattcacaaacatcccgataatatgctgtaaatcttcatgcattcttcccgcaataggcgtaccgacgacgatatcttcctgaccgctgtatttggccagcagtatgttataggctgacagcaagatcatgtaagcggtcgatccggtcaattcttccatctgttttataccctggaccacggtctcatcgagagcgaaattgtatcgctttccttcaaagcttcgaattcgcggtctggcaaaatctttcggcagctcaaatggcgggagttcctcatgaaatacgttcagccaatagttctcctgcctcttgatgcgttccctctgctccgcctgctgctgccatacagtgtaatctttgtattgaatccggagcggggttaattctttgccgtcatacaattgaatcagttcttcaacaaaaatattcatagaagcgccgtctgaaacgatatgatgcatgtcaaacatgaaaacatgtctgtcctgttctaattcgatgagtccggcccgaagcaatggagcctgactgagatcgaaaggccgcacgaaattgcggaacagctcctcgacctcttcatcagctgctttgtacctttctatagagaaatccgcctgcggcttgatcacctgcaccagctctccgcggaccatttcaaatccggtttgtagcgattcatggcgctggatcagactttggaatgcagattgtaaacgattcatgtcgatcctgccttccaatgtcaaaatccccggcatgttgtaacttagttctccgccttcaatttgtgtagacaggtaaaccatcttttgtacagaagatacaggataaacatctttggcttctgcaacagggatttcatccggtccgctggtttccgcgcctgcaatgaccctcgccatttcttcaatcgtcgggtattgaaacacttctctcaatgaaatgcttttgccgaattgcttatggatcctggtaacgagcgtcatcccccgtaacgaatgcccgcctagatcgaaaaagttatcttttacgccgacttgttctaccttcagtacttctttccagatgtgacccagctgctcttccggtcttgtccttggagcaacatagtcaatcccggtctgcaagcctgcttcaggcagcggtaacgcgctgcgattcacttttccattggaggttaacggcatttgctccagttgcatcaagtatgaaggaaccatgtagcctggtatttgatcggagagtttttctttaagctgattggtcggcagtgacttctcccctgtaaaataggcatacaaatcgctttgcccctctgcactttctctggccaggatcaccgcttcttgtacatgctcgatgttgagaagagcggcttccacctcgccaagttcgatccggtaaccgcgaattttgacctggtgatcctttcttccggcatattcaatgtttccatccggcaggtaacgggcaaggtcgcctgttttatacatccgctctccgattacaaacggatcggccacaaacttttcgcccgttaattcaggcaagttcagatacccccgtcctactccgtctccggcgatgcacagctcaccttttacacctataggcagcatccgatcatgggaatcaacaatatacacacggttgttgcccagcggtttgccgatcggcacgtaaccgccgtcgtcagcggatgccaatgtctccggtacgatgtgaaagaccgatgcatccacgcaggtttccgtcggaccgtatacattggttatgagcggcattgatgacccgttcgaagcaaacaattcaagcaattgcgccaccgtcgcctgcgggagcgcctctcctccaataagcatgtgccggatcgttaccccatgaaggctgtctgcagcgataagcaattgcaaatgtgacggtgttccgtctgttacgtcaatgcggtgggtgcgataatagtttgacaaggcataaccgtctgatactgatgctttagggacgatatacagtgcatgtccccctaacagtgccgcgaaaatttgcttgaccgatgcgtcgaaatagtacggtgccaacagagacacacgcaatcccgaatcataagcatcgtacacttgtccgcggagcccctccatcaaatgaaggacctggcgatgctcgatcagcgtgccttttggcttgccggttgtgcctgatgtgtaaatcacatacgccaagtgatccggtccggctgccgtcaccagattcgagccatccccgctgttcattcgttcgtcattcagcagtaaaatctctccggcaaaggatacacgatcttgtaaatggggctgtgccagcagaacctttgctcctgaatcctccagaatatagcggaggcgttcctgcgggctgtccggatccatcggcacatacgcgcccccggctttcaggatcgccataatccccacgatcatttccagagaacgttctgccagaatacccacaggctggtcaggctgcacgccttcgcttcttaaaatccgcgccaggcggttggcccgctcattcagctcacggtatgtgaatcggcttttctcgtaaactgcggccgtatgttccggcgtgcgctccgcctgctcctcgaacaattggtgaattgttttgtcccttgggcagtctatcgccggttgaccccatctctccacaatctgctctttctccttcgcggtgatcatctccagggatgaaagcggcgcctgcggatcattcgcaatcgcctcgatcaattggataaagtgctttgccatgcgttccgcagtttcctgcttgtacagcgctgccgcgtaactgatcatacctgtaattccgtcttcattttctgccgcttggaacgtcaggtcgaacttcgccatcgcatggttgtccggataaggggtaaaacgcacatcatcgagggtcaattctccctgttctgtgttttgccatatgaacatcgtgtcaaacagcggatggcggctgaaatcccgggacacatttagcttgtccaccagttcgtcgaatggatactcctggttttcgtacgcttttaatgtatgctctttgacttcctgcacgtactcccggaatgttttttccccgaccggattcgttcgtatcgccagcgtgcccacgaacatgccgattaagctttccaaatccgaatgggttcttccggcaatcgggctgcctactacgatgtcttcttgcccgctgtatttggcaagcatggtcgtataagcagccagcagcaccatgtacagcgtgctttcgctcttcaccgccaagcctttcagctgttccgtcaactccggcccgatgacaaactcgatttgtcctccttcaaagctccgcgcagccggtcttccgtagtcggttggcatatccagcaccggaacctctccgctgaacacatccagccagtacgcttcctgtttcttcatccgttcgctttgcatatccgacagctgccacgccgcataatctttatactgaacccgcaatggcggcaattcttttccttcatataatgaaacgaactcttcaatcaaattcttgatagatacgccgtctgaaatgatatgatgcatgtcaaacagcagcaaatggcggtcttttgcaagctcgatcagtcctacccgcagcagcggtgctttctccaagtcaaatgcccgcacaaacccatgaacgagggcttccgcctgttcttctttcgcctgagtgaattccactgcaaatgggacgtcgtcatagatccgctgcaccggttctccgtctatcagttcaaagccggtacgcagcgtttcatggcgctgaatcagcttgcggatcgccttctcgacaagttcccgatccagagctccatcgactctcatgacactcggcatgttgtagctcagctcaccgcctttcagctgattcaaaatgtacagccgtttctgcgccgaggagacggcatagtatccttttgcttcaacggtcgggatagatgtatatgctgtgtgtttcataccggtaatcgtttctgccatttcttcaattgttggcgatcggaacacttcccgcagcggcaggctgacccccatctctttgtgcagcttcgccgtcagcgtcgttgcccgcagcgagtgaccgccgatgtcgaagaaattgtctttcacgccgatatgcggaagtccaagcacctcttgccagatatgcgccagctgcgcttccgccgctgtacggggagcaacgtattcgatccctgtttgcacgcctccttctggtgctggcaatgctttgcggtcgatttttccgtttgccgttaacggcaaacgctccagttggataaagtacgacgggatcatataccccggcagttcctgcgacagcgctattcgcagctcgctcaccatcagctcggtgttcgctgaaaagtatgcgcatagctgcttttctccgtctccgtcttcaagagcggtgactactgcttcctgtaccgactctatctttaagagctgagcttccacctcgccgagttcgatcctgtatcctcgaattttcacttgatgatcgatccggcccaaatattcgatgttaccgtccggcagccatctcgccagatcgcccgtccggtacatccgtttgccgggttcgaacggatgatccacgaacttctccgcagtcagctccggacggttcaggtaccccctcgccagtccgtcgcctgcgatacaaagctctcccggtactccgactggctgtagacgcattgatcccggtgccatcatatacagctgtatattcgagatcggcttgccgatcggtaccgatgcatacgcttggttcgcttcgcagttgaagtacgacacatcgaccgttgcttccgtcgggccgtacaggttgatcagttgggcgccgttcacaggcgtaataaggcgatgaaatcttgccgtatgtgccggcattaatgcctcgccgcttgcaaacacttgccgcaacgtacgcagcttgcttgtctgtccgctcgccgtctgtgtttccgcaaacttcaggaaggcgtgcagcatcgccgggacgaaatgcattgtcgtgatactttgctcttctattgtgttccaaatcacttcagggtctttctctccgccgagcggaagcaggcacaccttcgcaccggtcaaagcccaccagaacagctcccataccgagacgtcgaaggtgatcgctgtcttttgtaaaatcgtatcgccgctgccgatcggataagccttttgcatccacatcaaccggtttataaccggacgatgttcaaccataacccccttgggcttgccggtcgatccggacgtgtagattacatatgccctatcgcccgcaccagacagcggctccaagttagaaacgtcatcatcgtaaacggaagtatcatcgagatcgatgaccgttcctgcaaaagcaacccgttctttcacgtgacgctgtgacagcagcaggggcgcccctgaatcttcaaggatgtagcggatgcgttcctccgggtaatccgggtcgattggcacataagcgcctcccgctttcaggattgcataaatcccgaccatcatttctagagaacgctcagccatgatcgcaacaagctggtcggcctgcaggccttcagctcgtaaagtgcgtgctagttgattggcccgttcatttaactcaaggtatgtcatacgctgctcctcgaatataaccgcctcatggtccggcgtccggagtgcttgttcctcgaacagctgatgaatcgtttgttcacgtgggtaatgcatttcgttagactgaaaacggctgtgcagctgttctttttcttgctgcgtcagaatttccatttcttctattttgacagacggcagctgcagtacttgctgcataagctgttcaaaatgtccgcgaatccgctctgcctctgattgttcatattcatttcggttaaaactaaaatgaacggtgagttgttcgccagggatgacaactacattaaaatcgtaatgggtgtgttcttctatatggaaattcacgatatttaaatccgcagcatcatggccctcttcaacttgctgccctatcggataattttcaaagatcatgatatgatcaattaagttttgcttttgttccgtttgggcctgaatttcgtataaaggataggtatcgtacgattgggaagccagcgcgttttgttgaaccatttgcatcgtatcagcaaaagtgctgtcctcatcgcagcggatgcgaaccggaatcgtattgatgaacagaccgatcatctgttccacatcaggaatttccgccggccttcccgacacgacactgccgaagacaacgtctgcggacccgctgtatttctgtaataaaattccccataacgtttggatcaacgtatttaacgtaacctgatgctgatttgcgatctgctgtaattgttttgtctgttcgtgatcaaatcggcagatcacattggcataggcgtattctttttgttcatgctgcgctattttatgaagaagcgtggtttcacctttatatccttcaagatacccgctccagtaccgctttgccgctccctgatcttggcggtcaagccactcgatatagtcgctgtaaggagctgccgatggcggttctggttccctgccttcctgtaagaagctataatgatcaaacacttccttcgtgataagagacaggcaccagccatccatcacaatatgatggaagctccaaatcaaatgatatttgcgttcttccatacggaaaatcgctatgcgcatcagcggatcccgagctaagtcaaatccttttgccttgtcttctctttgataggctgcgattgcatcctctctcaggtgctcctctatatcacgcaaatctgcaaaatgaatttgcggtgtttgcgttttatagacaatttgtaaaggagtatcgttccagccgctgtaaaaacgggttctgagcacggcgtatgtttcaaataatcgttcaaggcttgctttaaaccaatcaatctttaactctccctgcaaatcgaacgatgcttgttcaaaataagaacttgaggcctcgtccagcaggctgtgaaagagcattcctttctgcatcggagtgagcggatacacgttttcaacctcacctgcatgcggcagttgaatgaggagctgatccaattcgtcaatggacatgccctttaacaaaatatcgcttggcgtcagttccgattgttctttatgaacgcaatgcgtaatgattgtccgcaggcggctttgaatcgtttctgataaccgcatgatcgtttcttttgcgtactgtttgctgctgtagctgatcgtaagcttcagccggccctcggtgatcattccgtttatattcaacacatacggtctttcttgatgtccgcttgagtctgaaccgcaagaataagaagataactgaaccccatgctgctgtaaatcttggtcaaactgtccaaggtagttaaagctgatctcgggattgagtttcgatggcattccgccgcttaagtaccttgctattccatatccgatccctttatacggaatttggcgcaatccttctttggtcgtcttgatataatcagagatttctttgcccggctgcgcgtgcagcacaaccggatacagacttgtaaaccacccgaccgtgcgggagatatctatatcttgtataatctgttctcggccgtgtccctctaaatgaatcggaatttgttccagtcctgaccaatgcgatatggaaagacccagagaagttaaaagcaaatcgtttatttccgtgtgataagcgcgattcgcttgttttaataagagctccgtttcctctttcgtccattccacagttgctgtttcactgtcttttgcagttgtatgggtctcatgaaaatctttaggcagcggtttgacttcggtttgttcgatttttgtccaatattcctgttcttgttttatggtttcactttgcgcatattctgagagtctcttagcccataattggaaagagtctgttttttgcggcagttgaatcactcgcccgttctcggcttgcttgtagccgctaacgatatcttccagtaaaatgcgccatgaaatcccgtctataatcaaatgatggatggcaatgagcaaatgatctccatctgcgcattgaaacaacccggctttcattaacggcccatcacttaaatgcatactgctttgtatctcatcagctttggcttcaattgtccgtcccggatcgggatcttctttcagattcaggacttctaagcggtacagtccgctttgggcgatttcttcattctgtgcctcacagccattttccgtagtccggaatgtcatgcggagcgcatcgtgatgttcagcaagcttttgcagggtttgatgaagctgcgtttcctgaaaaccttccggcgcatgcagcatgacggcttgattgtaataatgctgatctgttgttatttgttcaaaaaaccaatgctgaataggagtcaggctgacttttcctttgacctcaccttgatcggctatacgcagattctgcttgatatgcggactcaattcagcaattgttgcatattgaaacaagtctttgatttccattttgtatccttgctgatttaatctggaggaaacttgaatggatttaatggaatctccgccaaggtcaaagaaattatcaagaatactgacgttttcagcgcctaataccgattcccaggcagaaactaatatttcttcagcttttgttcggggagctttatactctgctctgtcctgcagctcgaaatccggagccggcagcccttttctgtttatttttccgttagaagttaaaggcatttcatcaagctcgataaaataagccggaaccatataacccgccaggctgtgtgacaattgtttccggagccgggctgccgttatttgtccgccgctcacgtaatatgcacacaattgtttaaacccgtggacatcctctctggctgtgacgacagctttcttgatcgcttcttcttgaagcagtgccgcctcgatctcgcctaattcgatacgatagcctctgattttcacttgttcatctattctgcccgcatattcaatgtttccgtccgccagccacttcgccaaatccccggtcttatacatcttcgctccgggttcaaacgggtcatcgacaaatttctctgccgttaattcgggccggttcaaatatcctcttgccacaccggcgccgctgatatagatctctcccggcactccgatcggcgcgggtttcatattctcatcaagaacgtaaatgctcgtgtttgccgcagcggttccgatcggtaccgaatcccgtctgtcctttgcgggatcataacggtaaatcatgcagccgacaacggtttccgtcggaccgtactcattgcatatttcaatccggccttcgaactgttcatgaatgctgcgggctaaccgggtgcttaagttttccccgcccacaatcattcttcggacagccgtttgatcggcaatgttcatttctttcaagacctgcaaatgggccggggtcaatttaatgatatccaccctcgggtcccgcacaatcgattcaagcagagctgttttatcctctccgtcatagacgatgattgcattgcctgtgacaagcggcgtgaaaatagaagtcaccgtcagatcaaaagaaattgacgaatacaatgggaagttggctttctcgccttttacataaacttctttcgcccaccaaatataattggtcaagcctccgtgctcgattagtacgccttttggccggcctgtggaacctgacgtataaatgacatatgccaaatggctcacatcatttatcggagcaaggtcagagccattttggtgataagaactttcatcatcaagtaaaaccgtgacgccttcataggcaagctgtttcctgacgtcccgctgcattaaaacgattccggcttgggagtcatccagcatataccggatgcggtcttgcggatattccggatctatagggacataggctccgcctgattttaaaacggcaaggattccgaccaccgattcgatgctgtttcttgtgatgatggctacaggctgatctgcctgcactcctttcgctcttaacgttcgcgccagtcggttggcccgcttattgagctctccgtacgtgagctgcatgtccttatcaatgacggctgcttgatcgggcgtacgctgcgattgctcttcaaataattgatgaaccggcgtctgcggaaacggcgcggccgtgtcgttaagcgtctgcagaagggttcttctttcgccttccgttaacaattcaacttgatccacccgaatatccgcatctgtcacgacttgatgcaggatttgcatgaaatgttcccgaacccgctctatgcttgcccgctcatacacatttgcattgtattcaaaagagatgttcatctcgtcgcccggaataacagtcaaattaaaatcgtagttggtctgttcttccatttgtacgttggaaatcgtgatggatgttccgttttggcggcctatactttccatatactgatcaaccggataattttcgaatatcattaaatgtgtaattaaatcttgcttttgcgttgtacgcgcttgaatatcgtacagcgggtgcgtctcaaattgttgagacgctacagccctttcctgcgcctctttcataagctcagcaaacgttgtcccggcttcacatcggaatcggacgggaatggtgttaatgaataagccgatcatggtttccacgtttggaattccagcaggtcttccggatacaacacttccaaacacaacgtcccggctgcggttatatttctgcagcaaaaccgcccatgccgtctgcagcagcgtgttcagcgtgacatgatgcttgcctgccgtccgcttcattttcgaagtgagatcggagcttatgtcacacgtcactttttccggaacgtatcgtccgtcttccgctgcatggtgatctttaggaaggccggtttgctcctcatatccctccaagtactgatcccaataagccgcggcctctttcgcatcttgccggccgagccattcaatatattgactgtacggagttattgacgattgttcaggctgcttttgctgaagcaaagcaaagtaattctcgaaaatttcttttgtaatcagcggcaggcaccagccgtccatcaaaatatggtggaagctccagataaaacggtatgtcttttcatccgtacgaaggataaataaccgcattaacgcgcctttttctaagtcgaacccccgcatcttatcttctctggcatactgctgaatcatcgcttctttttgtgattccttcatctctcgtaagtcattgaattgaaaaccgatttttttcgttttgaatatgatttggagcggctgatccttccagcctctgtaaaaattcgtgcggaaaatatcatatttttgcgataagccgtccaagctttttgaaaatgaatcaatttccagatctccatgcagatcaaacatcgtttgctgaaaataagcacctgaattcggatcaaataagctgtgaaacagcatgcccttctgcatcggcgttaatggataaatattttccgcttcgcctaattcacgcgtctgctccaaaagctgttccagttcgtcgattgagatgtcttttaacaggatgtcacttggtgtgagagaagtctgctgccggcttacgcaatgtgcaatgacttcttgcagactttctttcaacccccgggcaaattgagccatagtagatctttcgtattgtttgctgctgtagctcagtgtcagtgataatgtcccttcggcaatcatgccgttcaaatcaagcacggccgttctctcttggttttcgttcattgataaccctgtggaaaaaggcgagatgcgcaaagcttgatgcttcaggtcttggtcaaattgtcccaaatagttaaacgatatctccgggttcagctgcaggctgtcggcttccggatgcccggatatatatttgatgatgctgtaattcattcctttgtcagggatacggcgcagcccttcttttacgatcttgatccgctgcgacaggttttttccggcttccatcctcaggacgacagggtactggcttgtgaaccatcctatcgtgcgggaaatgtcagcatccggaataatcggttctctcccgtggccttccaaattcacgacaatgtcttccgtgcctgtccacttgtgaacagccagccctaacgaagtcagcagcagatcgttgatatccgtgttgtaggcgcggttcgcttgttttaataattgctccgtttcctcttttgtccattgaatcgtcacttcttcgctgtctcttaataacgatccttcgctgatagtgtccttaggcaatggctgaggctttatacttgaaagctcagcccaatacgcaatctcctcttccatatcggtttccgccgcatacttggacaattgatcggcccagaatggaaacgaatctgttttttgcgggagctggatcgtttgtccgcgttctgcctgctcataaccgcttgcaaaatcttcgagcaaaatacgccaggatactccgtcaatcagcaaatgatgaattgcaatcagcaaatgatctccgtccggacattggaacaaaccgagcttcatcaatgggcctttgtctaataccatgctgctttgaatctcattcgctttatcggcaatcgcttgagccggatcggtttcccctttataattcatcacttccagatggtatagtccactttcatctgttcctgtaattcgcggagcgtatccatccggcgttttttcaaaaatcatcctcaaggcatcgtgatgcgacgcgatccgttccatcgtccgacgaagcgggccctctttaaagccttccgccgaatataacatgacggcctgattgtaatggtgtgcatgcggcattttttgctcaaaaaaccaatgctgtatcggggtcagcttggttccgccattcacttctccttgatcagccaccctgctgaccggtgctacaaactgactgagttcagcaatcgaggggtgtttaaacaaatgcttcatatcaaccttgtatccggcttgatacaatctggatgacacctgaattgatttaatcgaatctccgccaaaatcaaagaaattatccaaaattcctatacgttctgcccctaatacttcttgccagatagacgccagcagttcttctattgtgttccgcggggctatgtattcgttttccgcccgcgtattttcgtcagcagcaggcaaagctttcagatcaatcttcccattggaagtgagcggaatgcgttccaatgggataaagcgggagggaatcatataattcggcagttcccgggataattcttctctgaactgcgcagcggtcaaagaaggctcgccgacataataggcatacaattgtttggccccgtctgcgtcttcccgcgcgacgactgcggcttcacgaacgttttccagattgaacatggctgcctctacctcgccgatctcaatccggtagccgcgaattttcacttgatgatcaatccgccctaaatattcgattcttccatccggcagccatctggcgagatcccctgtcttatacatcttttgaccagggacatgcagatgctccacaaatttttcctccgtcaattcaggccgattgaggtagccgcgggccactcctgctcctccgacatacagctctcccggtacgccgatcggctggatttgatggtgcgctcctaaaatataagcttgatggttggccaccgggctgccgattgtgatctgttcatcagcggactgaacagggtgaaatgtagataccacgctgttttctgtcggtccgtattcattattgatccgaatgcgaggctgcagagaatgcagcttctcaactgtatctgtttccagctgctcaccgcctacaacaacatgctgaacatggatgaaatcctctctgttcatctgttcgatcatcgttttcagaagacggggagaagttgaaaaatgggtaattctttcttgttttatggcattttgaatggcaaaagtttctttattctcttcattaggcaaaaggtgcaaagttgctcctgagatgagcgggccgaagaaatttaaaatgaacgcatcaaaaacatacgggtacaagacaagcacgcgatccgccggagaatgcttgaaaaacgacttcttccactgaagcgagttcacaatgccgccgtgttcaaccatgacccctttcggctttcctgttgtacccgacgtataaatgacataggctaaatggctgtgttccgctactggtgataacaatgagcaatcggcatggtatgatgtttcatcattcaaatcaatcaccgggccgtcaaaggcgagactgttttttaaatgttgctgaacaaggagaacgtctgcgtccgcatcatgaagcaaatattgaagccgctcttttggatattcaggatccaggggcacataagcgccccctgccttccaaacagctataatggatacgatcatctctaatgaacgatcagcgagaatggcgactaacgtatcgggttgaaccccgcaattacgcaatgttcttgccaaacggctcgccttctcattcagttccctgtacgtcaaatggtcgtttttaaacttgacggccgcatgctcaggcgttctttctgcctgctcttcaaataattgatagactgttctgctcccggagaaatctctgacggtgtcgttaaaatcaaacaatagcttctgtttttccgcttccggtaagatctctgccgtatggatcgcggcttgaggctgaaacaggatcacagacagcagctgatccaaatgggatacaatttgattgatatagcgctcatcgtacagattgccgttataaaaaagcttcaaatgaatcccgttgttctccaaatcaaagtgaaacagcgtatcggttgcagtatcttctttacattgcaaggaatgaatttcgttgagcgaaacgacggtatgaatcaaaggcatatgctcgtcattgtattgcacgctcagatgccgggccatttttctaaacggcaggttttgatttttcagagaatcattaacggcttctttcagctgcccgaatacggttttaaatgtgctctcgtttgaaagcgtattttttaagaggacaatgttgttaacggctgactggccggctttttgcttcgataccgttggaatgccaagaatcaggctcgttcgatccgtatatttatataacaagcactcaatacccgccaataaaatcagataggccgccatatcggaatgattcgccattgtcatgattctttgagatacttccggagataaggaacggcagatgcatttttcctggtagccggtacgggccaacgacgctttatccgctgctttaaagtaagggaatgcgcttagaccgtcttcttcatcaaacaggttttcccagtacgtttcttgagttttaaataccgacattggagcacctcattttatatattttaaagaaataatgcttttccctaaaagttcaattgaatagaatcaagcgcgttctcttcttcctcattgctgccgctcaatccgatatgttcgattagaatgcttggctgttccaaaatcgccgataggatgtgtaagtagtcgtttgataaaacctcgattctgcttttcttaaacagttttttcgaatattcaaacagtccgtgatagttgtcgcggtccgcctgaatcgacaaggtcaaatcgaatttggcaaccggatgatgaaatggatacggcttgagttgaagggaatcgaaagtcaattcagcatgatcaagattttgcagcacaaacatcgtatcgaataaaggattgcggcttgaatcttttggaagatgcagatgctgaattaattcttccaacggatagtcttgatttttataggcgttcagcatgttttcttttacttcatttaagtaggcatcaaatgttttacggcccgccgggtgattgcgaatgactaacgtattgacgaacattcccacgaccggctctacatccagatgagtccgcccggcagatggcgttcctacgataatatcttcttgtccgctgtatttggataaaagaatcgtataggctgccaataaaatcatatacagtgttgctcctgtgtcttcttccatttggcttaaacgctgtttcaagtgttcgggtataagaaattcaaatgattcgccttcgtaatcgcgtatggcaggtcgctcataatccgcaggcatatccagtagaggaatatcaccgtgaaactgatccagccaatacgcttcctggctcttgatgttccgtttctgaatgtccgattgctgccaaactgcaaagtctttatattgaatagagagcgggcccggttcgttcccctcgtagattcggcttaaatctttcatcagaatattgacggacacgccgtcagaaatgatatgatgcatatcaaccacaagcacgtgccgcgcaggttcaatttcaatcagtccggcccgcatcagcggcggcttggctaagtcaaacgctttgatgaaatcaagcacacggtcttccgcttcttcttcgcttgcttgaattcgttctatcgtaaagtcgacgttctgatgaatacgctgtgccggctcgccttcatataaatcaaagctggtacgcaacgcttcatgacgcgcgattaattttcggaaagcggcgtttaaccgttcgggatcgatcgtcccttccactttcatggcacccgtcatattgtaagtcagctcgccgccttctgtgtgacttaataaatacatccgcctctgagctgaagaaaccggataatatggcatttcctttgcagccggaatcggtacatatcgatttttgtccatgtgtaacgccttgtcagccaattgttcaatggtaggaaacttgaatatgtctttgagagacagattcacatccagctctttgtgaattctggcggctaaggctgccgctcggatggagttgcctccgagatcaaagaaattatgtttgatccccgcatggcttattccgagcacttccttccataaatctgtaagtttggactccgtctcattacccggcggaacatattcagctgtctgctgcagactcgcttctggtgcaggcagtgccttacggtttattttcccgttggatgttaacggcatatgctccagacggacaaaataggacggaaccatgtagtccggaagcttcgatgacaattgttccctaagctgcgcagccgctataggcttgtcgcttacgtaatacgcgcataattgttttaagccgtcttcttcttctttcactgttaccgcggctttttgcaccgcttccgcgttatgcatcgctgcttcaatttcaccaagctcgattcggtgtcccctgattttgacttgttcatcaacgcgcccaatatatacaagatttccgtccttcaatcgcttagccaaatcccctgatttgtacattttcgctcccgggacatacgggttttcaacaaatttctcttccgttaaatccgggcggttccaataccctctggcaacacccggtccgctgatatatatttcgccgattaccccgatcggaaccaggtttctgcttgcatcggccacataaatatccgtgttgagagcaggagtgccgatcggtacaaattcccgcttgtcccgttctgcgtcgaagtgataaatcatacatccgacgacagcttccgtcggtccgtattcattgaaaatgtccagccggcctttaaactgctcgctgacacttttggccagacgggtgcttaaattttctccgccgacaatcattttccgtatggcggtgccgccagcgatattcatctccttgatgacgtgcagatgtgccggggtcaatttgatcatgtctattcttgagtcccgcataatctcagaaagcacagcgcttttgtcttcgccgtcaaagacaatgatggtatttcccgtaaccagcggtgtaaatatcgaggtcacagtcagatcgaaagagatggaagagtataatggaaagttggttttctcacctcttacataaacctctttcgcccaccaaatataatcagccagcccctgatgctcaatgagtacaccttttggatttcccgtcgaacctgacgtatagatcatgtaggccaaatcatgcgcatcgctgtccgattcaagattcgagtgctcctcatggtatgagttttcctcatccaaaagcacaatgtcaccatcatacggtaattgatccagcaggctgcgctgtgtcaacacaacctccgctcttgaatctctcagcatatattggatccgatcttccggatattcaggatcaatgggcacgtatgcgccgccggctttcagaacagccaaaattccgacaatcagctcgatccgatgcgggcagatgatggcaacgaattgatccgcttgtacgccttttgtccgtaacgtccgcgccaatcggttcgcccgttcattgagctgtctgtacgtataccgctcattgccaaaaataacggcttcatgatcgggactctgttccgcctgcatttcaaaccaccgatataccgtttccttatgcggatacggcgtctttgtgccattacactccgtcagcagttgatgccgttcggtttcagacagcataggaacagaagacaatgtcatctccggctgctcagcaaggctgtttaaaatggcggtatagtgtctggtgatctgttcaatggtgtcttttgtgaatcgtcccggtttataatcaaaatgcatctctatctgttgaccggcatcttcgatcgtgagcatcaaatcatataaagagacccctggatttcgttctttcactttaaatgtacattcattgtgccggatttcatgaaattcaatgttttgaaacacaaacatcgtattaaacagagactttccggttgtttcccgctgtacatttaatttctccacaagccggtcgaatggatagtcttggttttcgaaagcgtcaagcgtctgccgctttacttcttccagataatccgtaaacgttctattggcgtgcggcttcgtccggattccaatggtttgtatgaaaataccgatgatcttttcgatatccggatgatttcttcctgaagcaggcgtgcctacgacaatgtcttcttgtcccgtatatttatgaagcagcacattataggcggccagaagcaccgtatagagagtcgtttccgccttttgcgccaaatcttgaagcgaacggatgacatccggctgtaaggagcatgtcacacgctgtccctcagaagaccgttctgccgctattgaaccgtctgtcggcaggtcgagaatgggaatttcgtcttgaaattgttccagccaatatgtctcctgccgcttcatggcatcctcattcagccgttggttttgccattctgcgaaatctttatattcaaattcaatgtccggtaatggtttctgatgatataaagccagcaattcatttgtaaggatgttgacggaataaccgtccgaaatgatatgatgcatatcgatgagcagttcggcctgctcgttttcaatcttgatcagctccgcacgaactaacggagcttggtccaggcggaacggttttacaaaccggtctgaataggcatcaaattcatcccggctcattgtccggacatgaacgttaaaatcaacttcgttttcaagtttctgaacgatatcgccatctataatgtcgaaatacgtgcgaaacgcttcgtgccgctgcatcacttgttgaagagatgagatcagggcttgctcatcgtacttccctgttattgatatgtggccgaacatattttgcgccagctgatccgtttccagctggtgcaggaaatatactctttgctgtgccggcgatgtcgggtaatacgcttttttctcggcagccttcattgggaggtgcacgactttcgtttcgttctgaatgaaacgtgctaattccttaacagtctggtgattgaaaaattgtccaatggaaaccttttgatgaaatgtcttctgaactttggaaagcataagcgttgcctggagtgagtttccccccagagccaggaagcgatctgatctgccaacccgttcaaggccgaaaagttcctcccaaatccgcgccagctgccgttccgtttcatttaccggcgcctcataggcttcagtaaaatttgccgtattgcttcctattgaagagatccgcttctggtgttcggcgtaaagtgcttgtaaatcatgctgttcttcatcggaaaacatcatcatggcgtcaagagggattgaatctccctcaaccattttttgcagcaattttgtaaaacccgctccccactttttcatgatttccggactgacgacgttcgtattaaagtcgaaatcaagaacatattcttgatgcgcgtctgttatgttcagaaataaatcgtatagggtgcattttaccgggtatgcaacgggctccgcctccgcctttccgaaatgcagctttcgaaaaggcctgtctaaattaaagataatacgcatatccggcacttgatcgtgcggaagctctctggccaccagtgtcatcgggacggcttggtgccgcattgcaagattcacgctttctttcatactgccaagataaccggataaagtgctttctgaagaagacgtgttcttcaccggaatcatattgacgcaatttccaatcagatcatgctgtttcatatgcgattgacctgctgcggggaccccgatcacaaggcctgactgtttggtaagccggtgcagaaaaagatgaaatgcacccagcatcgtcacaaatacgctatttttcatctgaatgcttaatgaccttaaagcctcgctcaatggccgtccaagcctgacggtacaccggtctccctcatacccgttcggataacggacagaatctgtgcttggcagaattggctgctgtatcggttcagagaaatgacgccgccaataacggaccccttcttcataatggccgctgtcaatctgtgcctgctgccagtctaagtattggcgaaacgaaacatctgcctctttcggcgaaatcggttttccttgtacgattgccgcgtagttgctctccagttcttgaacaaaaacggcgattgaccatccatcggcaatgatatgatggaacgtgagcacaatcagatgttcattgtgagccgatgtaagcacatggattctaaacaaaggtttttgttcatggaaatgaaacggccgcttggcatcttctgtcagccatttttggatttccggctcccgatgttcatgcgggtgaccggtaaaatcaatgacaggtatttctatattcatccgttcctgcacttgctgtacctcgtcatcgggatgaatcaccgtacgtaaagcttcatgacggtcaacgatatgccggacggcttgttttaatgatgtatactgcagttcgcccttcactttcagcataatggactggtttaaagcggcggaagcttcattcccgtaatgggatgccataaccaactgcttttgttcaggtgaaagctcgcgcgtcccggactttttacggcctccgccatcaggggaatccgggccttccggaataaatccgcctcggcgaagatcctccaccgtgtctttcaccgcttgaataatattttcgatatcatccgcggtatgcgccgcagacaagaagcagttgcgtccctcccatacatagacccctttatagttgagatggtaaaagaacaagtcattatcaagcgatgagacaaaccggaataaagaaccgaatcgaaccatgcggataggcacttgcgcttgttcgaagcagcgattcagctcatcgaccaggtaggctgttttttgattaagctggtcatacagatgttctccttcggtttgtaaatggcgaaggacggctaatgacatcctcatggtaagcgggtgggtattgaaggtgccggccacaaacgtgcgtttcgcctcgtcttgcgggtaggaatcgtccccatactgccaggtacccccgtcgatcgcattcatgaactcagcttttccggcaactacccctaacggctgtccgccgccgatgatttttccgtaggtcactaaatcagcctgaatgccgaaccattcctgtgcgccgccaagaccgatccgaaatccggtaataatttcatccataatcagagctgttccggattgctgcgtgatcgcccgcaattctttcaaaaatgcctgcggctgcaaatccggtctgcggctttgtaccggttccaccagtacggctgccaattcatcaccaagactgcggatcacgtccagcgaatcgggattgttgtaatgtaaaataatcaaatcatccataaagctctgcagtatgcccggagccagcggattcgcagacgcagccccgccttttgtgccggcaacccctaatacgccgtcaaacgtgccgtgataagatccggagaacgccacgactttctttcttcctgttgccgcccgcgccaaacgcagggcaaccatgacggcctctgttcctgaattatagaaagcgaccctttccactccggtacatgtgcggatccggtcggcaacttcaccggcgacatctgacatcgggccgagcggaggcaatgatgaacgggttgaatcatcgataacctgtgtaataaaggaaggatgatgcccgaaaaggttaaccccgaatcccatggtgatatcgatatattcatttccgtcaatatcccacattttagaaccgtcagaacgttcggcgataatcgggtatacgatttccttccaatacgaacggaagctggacaaattgcggttgtttgcatgagcaaatcgggtgttgtccgtatattgtttggaacctttcgttttatcggcgtatttcttgatgaaatcttctaagtattgtttttgccgtgcggtatagtgtccctgatcattcaggttctgaggctgaaaaggaacatagggtttcgcttcttgagccgctttcttttctgcagtgacggtcggaggcccctgctcgacagaaggaattgatttcttttgcgctttagcgtattctttctcatcggaatgatgtccgctgtttctcaacaaattaaaactatttaattgagcttgcaaggtatcctgaattaattgattctgagaagcgattattttttcgagcatatgctcttgatgaccttctctgcgatccgattcagactgcgcttctgaaatgacctgtatttcctgcgccggaacattctcttgagggggagcggatgcaaaggacgatggaacggtctcagccaagtaatctatgacactttgaaggttgttcatcgtatcaaaaaaacgatccatcgggatgtctaccccaaattcgtccgcaatggcttttttgacctgtgacagcatgatagaatccattccgagcccgataaaatgagcattcagatcgagttcctccgctctgatccctgaagcgttgctgattacagttttcaggaaggattcaatgtgcgctttcgattgattgatattcaatgctgctcctcctttcttttcgccctcgtttaagcgcaattggtcagcttcagcccagcatcggctccgttcaaacggatacaggggcaatggcgtcttttgtacagtttcaccggaataaagcgcgcgccaatcgataacggctccttgcacaaataattcggctgcgcgattcagccatgtgatccgttcatcttgcgtacgtaaacgctgcttaatcagagcggctgcttgttgattcagctcttctttatgagcaggcagcatttccttcatattcttgtaaccgatgtatacaccgggaaggtttctgtctccctgaatcaggcgggtcagcttatccgatagttcttgtttaccggatacaatcatggcaatgccatgatccaaatgagccctgcccgtacttgctgtatagcaaatggactttaatgaagcttggctgtcatccgatacatattgccggtactgctgtgcgagttcatagagtgatttttcagtatgagcggataaaacaaataggtgcggcccatgttcatcctcgggtgcatactcactttgagaaatatattcttccaataccacatgagcgttcgttccgctaaaaccgaacgagctgattccgcctcgcagcggctcatcaccggatgtgaacgctgcagcttcctgattcacataaaatggtgatgagtgaaaatgaatgagcggattaggttcattaaagtgcactaacggcggatttttcttgtgattcagcatgaggacagatttgatcagcccgacgatgcctgccgcttcaaacaaatgaccgatgttcgatttaacagaaccaatcgcacaaaattgtttttttgccgtatacttttcaaacgctttacaaagcccgttaaattcaaccggatcgccgagcttcgttccggtgccatgcgcttcgatgaaagacagtgtttcaggagcaatgcccgcgtctttccaggccgtctcaatgacctcagtctgagctgccggattcggtgctgtaatcccggcggttgttccgtcttgattcatcgcgcttcccttgattacgccgtaaatatggtctccgtcgcgaacagcatcctgcaaaggttttagcaggactgcggccgcgccttcacctgtgcccgtgccgtctgaatctttgctgaacgttttggtgtatccgtccgaagattccatatcaagcccgatacagatcggcaagatcgatgttcggatacctccggcaagagccatttcacaatcgccggatattaaagatttgcatgccatatgaacggcggcaagcgatgaggagcatgccgtatccactgtgaccgccggcccttttaaatttaagaaataagcgattcggctggctagcacggaagggagattgcccacgatatattgatgaagttcctccggataattcgcagaaaggagacgttcataatcgtagcccaccttcgagtaccccgcatataccccgacacggctcccgttcatgctgccgccggcatagcccgcatcttcaatcgcatgccatgcagactgcaaaaacagtctttggttagggtccataaactgagccgttttaggagctaaaccgaagaacgaataatcaaagcggtcgatttcatctaaatagccgcccttcacaaactgactctcattgaactcgctttggatggactttaaataatccgccgcatctttcagccgggattcggggtattctcgaatgctgtgctcacctttttcaagcagattccaaaaatcacttttcgttgacgctcccgggacattgagcgacattccgataatggcgatatctttcggtgtcacatggcttggtttcgctgccgcgtcctgtttgatttcagcccggctttcagacagatatgccgctaaatcagtgatagaaggatacgtaaagagatctgaaacggcaagctcgcgtccgaatttctgttctatgcgctcggcaatctgcgataactgtaatgaatttgctcccatatcaaaataactgtcagcgaggtgaacctttttcccgttgagcacttcggaaaagatagacagcaattccgtttctatctcatgaatgggtgtctgtccggatgtttccgggctgctctccaaacattcattgatggcggcagactctgttgaaaaattccctgcctcatactgtctggcaagttcgtagcgtttaacctttccgctggttgttttagggagttttcggatcggaaggacttcttttatgctccagccgccccgcttgtacaaatgcttttttatctctttgacaagcggtgcgaatttttcaggtgattttttgtaaacaacaaagagcacgatttctccgctttgtgtcttttgatcatatacaccgcaggcggcaacccttcctaagtcaacctcttccatttcaatcgcgacccgttcaatatcgtgcgggtagatattttttccgttcacgaaaataatgtccttttctcttccggttacgactaagttaccactttcactaatgaatccgaggtctcccgtttttacccagccgtcagaagtcagcgctttttccgtactctctgggttgttataatacccttgcgtcacattgtctcctttgatctggatatggccgatgattccgtcttctactctttcatttgtttcatcggagatccgaagctgacaatagtcaataggttgtcccacctcgacgaatgaagcgcaattttggtcctctttgctgacttttacagctctttcaccaagatttaaatagtcacgatgcaaataaacgggaacgaattctttacctattttagagaacgctgcgccaaccgaagcttccgctaaaccgtaaacattcaaaatggcggatcttttcagattgaatgctgcgcatcttttcaaaaattcgtcacatagctccggcaatatcggttctgccccgtttgcgatgaccttgatgtgggataaatcccagtctggttcgtttttcagaaatttaaggaagtagttgtacccgaaattaggagatgatagaatactggctttatgttcatgagcttttttcatccaaagaataggtctgcgaataaataattctgtaggcattagattttgattgattccggttatgaagggaacaaggtggcaggcgatgagccccatatcatgcgttaaaggcatccatgataagaaggagtctttcgaatgaatggctagggcattcccaatggcgcacgtgttatgtattaagttgtgatgcgttaacatgactccttttggatctcctgtggatccggaagaaaattggataaaggcgagttcatccgcatcaggttcataaaacgaagcggggtaatcgtagatttgatcttgaatgacgtcagatttttcgtttaattgatgatggaaatcctgtaaatcgtgttctgcagcgtatttctttattttgtccaatactttttcagaggcaatcagaaagggatgatttaatatattccaaatgcgccagaccttcagcttatggtcatcatcttctccgatactgaccggaaccgggatcattcctcctaatatacaagcccaaaaagcaacgacaaatgatttgttttcttggatttgaaatacaatttcctgcttcggcttaatgccgagatgctgtaaatagccaagatacccttgcgcctcttcaaacaattggcgataagagacaaccgtctcgtttttatcggattcgataaaacggatcccgcgatcagagatattgcttctttcccgaatgacatctactaaggtttggaattgtctggtatacataggtcccctcctgggcgctttattttaaaatccgcaattcttcccaagccggaagctgtttagcttcacaaattaatttgcataaatggatcgaatgttcgagttcttgttctgaaagcacgtcttcatgccttttcattctctctttcagctcttggatttgcgtaaataatggcgtcgtcctattggaataatccgctgaatccttgttgtaatttcgcgcaatgacggattgaatcatcaatttattcagttgttttttgcgtaaatggacaatatgtttctttctttccgttgaattggaaagcgggggaacatcagatgtctgtcctaagggataaggtacaatgtgattcgttgtttttctcagcagaccggctaagacattgttcggacccatttcgatgacttctgtgactccatgtaaaagcaagtaatgcatcgattctgtccatctaaccggcatcgtcatgtgctgcttgagatgttcgctgatcgaatttccgctgctgtaagggcgcgcggtgacatttgaaatgatcggccatgcggcatcccggaaggaataccggtgtaatacagtctggaattgttcggaggctgatcgtatcatcgaactgtgaaaaggcgcactgacattcaaataagtgtatgccgcacccttttcctccgccatcttgatgacacgttccacagcttgccggtgtccggaaatcacatgctgctgttctgaattcatgcaggctacatctgccggaaagtcttccgtcgatactttcgaacatatttcctgcaaggtttggagagagagctgtgtcacggcggccatcgtcccctgctgctggggatccgcattttgcataagaattccccgctcccttacaagtgtaacggcatcctgaaaagaaagggcgccggcacagacaagcgctgaatattcgcctaagctatggcctgccaggaagcggggcttcacccctatttcctgcatatacacttgaaaagcaatcacactgaccgttaaaatagcgggctgcgcgttcattgtctttgtcaattcattcatatctccgttaaaacacagtttttttacatccaaggagatcgcatcgctcgcttcttcaaacaatctctttgcgagcacaaaatcattccaaaattgtttgcccattcctacaaattgagacccttgtccaggaaataaaaaggcaagattgttcatgagattcctccgatcatattgaacaggggatacaatatcctacaaaatatccctttatctaacatcctagcatgattataacaaatgtgtatagaatactttcggaggagttattgttcgttttcacaaacgaattagatatatttattcataaaataaaacatggggatttcaccgaaaatcagtcttaaagagagatgatgaaagccggggtggagcctgttaccggctcttcttcacttcggacgcgctcttcatgtttcatatgttttagggctattggcattattgtgtcagaaattacatattttctgtttattgtaaaaaatcatttgtatatctgtgaaagattgtaaactgattgcgcttgattataaatgcggtgcaagagatggatctggatggggaaaatccgcaaggacgaaatacgccgcagaacatgcgaatgaccctgcccggataccgattgacgcagtaaatcggcctattgagtgaacaaggttttcaggcataaaaaaacagccgttcagagcggctgtttttttaaaaagtataagaactattgagcggtatacccgccatccatgactacggcctgacctgtgaccccttttgctttgtcgctggccaaaaatacggcgtaatcagcgatttccttcactgacagcagccgtttttggggaacgagcggaaagatgacgtcctcaagcacccgctcgtacggtacattccttgttgcggaaatgtcctttaactgattgcggacaagctgagtgtccacatatcccggacaaagcgcattgacggtaatgccgtcagccgcgccttcaagtgcgccgactttcgttaaaccgatgacgccgtgcttggcgctgttatatgccgctttcccgtgaaaaccgatcagtccgttgacagacgccatattaatgattcgaccgaattgctgttttttcataatgggaaatgcatgcttcattgcgataaatggcgcagtcagcatgagacgaatgagccgttcaaactgttcggtgggaaattcctcgatgggcgcgacatgctgaatgcccgcattattcacaaggatatcgagacgtccgaattgtttctcgaccgtctgcagcatgtcggccacttgcttttcatttgttacatcgcatgtgatgctgattgcttcacagccttcatctttcaatcttgccgccgcttctttccccgcttgttcgtttacatcagagatgatgacggctgctccttcacgggcgaattcttttgcgatttcaagcccgattcctccggctgctcctgttacaacggctgttttttcaataagcaatgaatgcatgacggcacctcctcattttggtctgaccccgttttttaacgactggctgacagtaaaatgaccttctgttttctcaaagacctcctccattgttacaccttcctgcagttcggtgagcgtcatacggccatcatgaaaatcgaatacagccaaatctgtgatcagccgatcgaccacctgcctgccggttaaaggcagcgtacattccgttctcactttagattccccatatttattaacgtgctccataatgacaataatccgttttgctccgtggaccaagtccatggcgccgcccattcctttgatcatttttccggggatcatccagttcgccaaatctccccgttcggacacttccatcccgccgaggatcgctacatcaatgtggccgccgcgaatcatggcaaaggattcggcactgtcaaaatacgaggctccctttacttcggtgatggtttcttttcccgcgttgatcagatcggggtcctccgttccttccgccggataaggcccgatcccgagcaagccgttttcagactgaagcaggacgttataatcattcggtatctcattggctacaagcgtcggcatccctatccccaagttcacattcattccgtccttaatttcctttacagcccgtttgatcattcgttttctgctatctctcattctgtcagcctcctttatcatgcttgccggacggtgcggcgttcaatccgtttttcatgaatcccgccgagcagcacgtgctgcacaaaaatacccggcgtatgaatttgatccggatgaagctctccggcatcgacgatttcttcagcctctgcaatcgtcactttgcctgccattgcagcgagcggattgaaatttctcgccgtctttctgaacatcaggttgcccagaggatcggctttccaggcctttacgatggcggcgttccctgtaatccctttctccagaagataggtgcgtccgtcaaatgtcttatgttcttttccctcggctactgatgttccgacgcccgcaggtgtgtaaaacgccggaatgcccgcccctcccgcgcgaattctttctgcgagcgttccttggggcaccaattcgacttccagctctccgcttaaaaactgccgttcaaaggttttgttttctcccacataggatgcgaccatttttttgatctgccggtttgcaagcaagaggcctaacccccaatcatcaacaccgcagttattactgacaacggtcaagttttttacgccgctgtccctgatcgcgagaattaattgttccggaatgccgcacaggccgaagcctcctgcgatgagggtgtctccgtccttgatcagtgcagcagcatcttgataagagtccatcacttttccttttcccatattcgtttcccctttctgttttggctacacaaggcctgtcagactgtaaatggcgatgatgacaaacacagcggctgttttaatgacggtaatggcaaagatatccctgtaggattggcggtgggtcaacccggtgaccgcgagcagcgtaatgacggcgccattatgcggaagagtgtccatcccgccggaggccatcgagatcacccggtgcatgacctccggcgggatgtggaatgtattgattgcttctgtatacgctgctgacatcgtgcttaaagcgatgcccattcctcctgatgccgatcctgtaatcccggcaagcgcagtggtcgtcaccgctccgttgacgagcggatcagtaaacgtctgcgatatgccgctgctgaccattttaaagccgggaagcgccgcaatgatgccgccaaatccgtattcggctcctgtattcatcgacgccagcaaggcacccccgatgccctcattcagtccttctttcaaattgaagaggacttttttccaatcgaacaaaatcgtggtcatgattccgatgaacagtgcgagttctactgaccagatcgcagtgacggaggaaaggtcaatcttcccgaacgcttctaagccgagcggcgcaaaatcaaatccgtcagggtaccaatgcgggagccacatcgtgaagcatttgttcatgactcccacaaggataagcggaacaaaggcgagcacttgccgcgcggggctgggttgcggtaaaacaggcgtatgtgtttcattagccagacctgacgattcctctgcagcggaaacttcagattgaaatccagcatagccttctccggcattggccgcttttttgcgccgggattctaaataaatcattccggccgtaagcacaaatgctgcaccaatcagtccgagccagggagcggcataaatgtttgttttaaaaaaagcggtcggaatgacattttgaatttgcggtgtgccgggaagcgcatccattgtaaatgtaaaggcgcccaatgcaatcgtaccgggtatcagacgcttgggaatatcagctttcataaataggtttttagcaaacggataaatggcaaacaccgctacgaagagactgacgccgctgtacgttaaaatcgcacccattaagacgatggcgagaatggctctttttgctcccacaagcttgacgattgtttttgcaatcgactcggcgagcccggatatttcaacaaccttgccaaaaacggcccctaaaagaaatacgggaaaatacagcttaataaatcctaccatcttctccataaatatattcgagaagaaaggaagtacgaagcttggatctgtcaggagcacggcaaacagcgcacaaatcggggcgaataaaatgactgaaaagccccggtaagccgcaaacatcagcatgcctaatgccaataaaataataacaatgtccacaaatccccctcttttctgctcaatattagtaagcgcttacaaaaaatcgagaaaataaagcaaaaacatgccggttttgcacagtttctgaggctgaaaaaatgtgcatcatggtgaatgttccgttttggcgaaaaagggagactcttgctgtattagattgattggctgagcagtgagtttttttagggatagtgagatggatcagagaggatttttgctttataaatatgtattcttttttctttcatttatttcctgcaagaggaaccgataaaatccggccctcctgcatggtcattcagccaatgacaaccgggagctctttgagcgacctaaaaccaatgagcttgcggtattcaaggcggtgtgcagccagccgaagcttaggcatccgctcaaacagtgtgagaattgcaatttgtgcttcgatgcgcgctaatgaggagcctatgcaaaaatgggcgttctttccgaatgcaagatgcgggttcggttttctttggatatccattttgtgaggttgatcgaatatgcttggatcgcgattggctgcacctaaaaggatatatacctgctctcctttttttatggtcttcccatttatttcgcagtcttctgaggcggtgcgtgccgtcagctgcgtggggctgtcgtagcgcagacattcctcaactgcagtttcaataagcgaggggttttctctcagtgcgctaagctgttcagggtgtttcaataaagtaaacacaccgttgcttatgaggtttaccgtcgtctcgtgtccggctatgacaagtaagatacatgtcgcgagcacttcctcttttgaaagctgctcctccataataaacctgctgatcaagtcttgctgagggtgcgctttccgcttgtgaatcaaatctttgaaatatgacgtcagcctgcctgcggtgtcgcttgctctgactaacgtctttcttgatcgggtaagatcaatggcgtgaatgacgtctgccgtccattgtctgaattgatatctctcctctttcggcactccgagtatctccgcaatgataaggcttgccaatggaaaggcaaactctgaaacaaggtccgcggtttttttgatttggacttgatccaacaagtcatgaaccgtttcttttatacaggggcgaagtgattccgccgtctttgcggtaaattctttaccgataagcatccgcatccgtttatggtctgattgatttttaaataacagcatatcgtgctggatatgcgatagattttgatatttcgttgaagcttccggaagaggaatgcggtttttaaaccgaatgtctttcaaaatcgctgccgcttctttatacccggtgacataccagcccggatattttaatacggttcctttataaacaggatcaatggatcgcagtttgtcataaaacgggtaagggtcattccaaaaatccgaatccgcatggagagacggatgtgcaatcgataggtccgccgtcatcttatacctccgtattgcaggcggattgcaggccggctttcatttcttcaacggattcgacttcaaaacctaaatcatggagcatttgatgatcctctgtttcatgctgccctgctgtcgttaagtaatctccgacgaaaatcgaatttgcggcgtaaagtcccagcggctgcagcgaacgaaggttgacttcccggcctcctgagatacggatttcttttgacggattgataaaacggaacaaggcgagtactttcaggcaatacaccggatgtaattcgcttaccccttctaacggagttccgtcaatcgcatgcagaaaattaaccgggatgctgtcggcgtcaagcgcttttaagctgttcgccatatcaatgacgtcctgtttcgtctctttcatgccgacgatgacaccagaacaaggtgacatccccgattgtttcgccgtttccactgtattgaccctgtcgtcatacgtgtgggaggtcgtaatgtttgagtgattcctttgtgatgtattgatgttatgattgtaccggtctactcctgcctgtttcagccgctctgcctgttccggcttcagcagaccgagacatgcgcagatttttaaaccgtacgtttctttaatttctttgacagcatcaacaacttgatccacttctctgtttgacggtccccgcccgctggcgacgatacagtatgtccctatattcaggtcgtgggcgcgttttgccccctttagcaatatatgcttatccaccatccggtaagactcaatcggcgcttttgatattgaagattgtgaacagtacccgcaattttccggacacaggcctgatttggcattcataatcatattcagctttactttttttccgtaaaatcgttttctgatatgaaaagcggcatgcatcagcaataaaagatcctcatcaggacaatttaaaatggccagcgcttcttgattcgttacttccgccccgtccagcactctctctgcaagatccatccattgattcatgtttatctccccatttgtgtcagattcatgaaagaggaaacatctatatgtttctcaatcatgtgttgaatgttttccggtgaaacgtgatccagcttcggtgtgattcccaaaatcggaactttgcataatgtttcaatcatgctcgggtttgtcttttcgtccagccccggccggctccttacgccgttgataataatgccgagaacctctatccccatgtttttcgcatattcaacggttaaatatgtgtggttgatggttccgagatcaggcctggtgacaatcaccgccggcaattccatggcttttatcagatcactgactaagtaattttcaccaagcgggacggaaatgccgcctgccccctcaacgatgaaacactcatgacgatttttgatcttactccagtgggccatgacatccgccatgctcacggatttcccctcaagcatggcggccgtgtacggggcaagcggctctttccattcaaatggcgtgatttcttcatgagacagtgcggtttgtgacatgtctttcaagagcgaggtgtcactttccggatgagtccgcggcacaccgcttaaaaacggcttaaacactccgatatccgcctgtttctgccggaatgccgcggcaagaccgcaagaaacgatggtttttccgacgccggtatctgttcctgtaacaaaaaaacttctcatttgtttatattcagctcttttctaatggaatcaaatgcttctgtcagctcgtctatatcctgtaagctgcgatccgccgtaacggtcagcctgattctgctttcgccttccggaacggcgggcgggcggatggccggggcgcagattccctttttctccagcagtgcagcggctgaaaccgctgtttttgcatcaccgatgataacggggataatcggtgtatctccgcctcttacggtaaagcccatatcggccagacgcgtttttatcgttttgacagacgactgcagctcacggcgcgtatcgtgcatatctgatatgatgtcaaatgccgtatgcgaagccgcacaaattgacggcgggagggccgtctgaaaaataaacgtccgcgcctgattcagcaaaaaatcaatgaaaatgtttgatcccgcggcaaaaccgccttccgttcctacagctttgcttaatgtgccgatgacaacatcaggacaaacaccgaaatagtcactggttcccccgccgttttccccgagtacaccggttgcatgcgcgtcatctgctatcacaaatgcctggtactgctttgcaagcgccattatgcggtcaagaggcgcgatggtgccgtccatgctgaagacgccgtctgtgacgataaagcggcggttccgagcctggacggaggcaagttttttctcaagatcagccatatcaatatggcggtacacgatggtttccgcttttgataaacggcagccgtcaacaatgctcgcatggttcagttgatcgcttaaaatgacatcgcctttttgaggcagtgaggcaagcacgccgatattcgccaagtaaccgcttgaaaacaataaagccgcttccgtctgtttaaagtccgcgattgtgtgttcaagtttttcgtgccacacagtatttcctgtcgttaaccgtgagccgccgcttcccgctccgaaccggctcagcgccgtttgcgcggctgtgatcagccgctcatcttttgacaggcctaaatagtcattggacgcccaggtctgccgcttttgccccttggttttgagagcggtttcctgtgttcgcagcgtccgatacagcccgtctcttttcaccgcatcgagccttccgaggagccatccgtcaaaatccacggccggtcacctcggctatcgcttctttcataatggagatcatggcttgtaactgatcggttgtgctggcaagcggcggcagaaaggcgatgacgtctccgagcggccgtgtcagcataccaagctctctcatttttaaggacaccttgtatcccatccgcttttcaggcggataaggctgtcttgtccccttatcctgcacaagctctatgccgcacatgaaaccgagctggcggacatcgccgacatgaggaagctgcttcagatcatgaagaaatttcgctgccgtttttgatttttcggcgacttgttcaacgatgcgctctgattcgaataaacgcagattttcaattgccgcggcacagccaagctgatttcctgtataggaatggccgtggaaaaatgttttcattttgtcgtagtcatcgtagaaggcttcataaatggcttctgtggcaaacgtcacagcgatcggcaaatagcctcccgtaatgcctttccctgccgccatcaagtccggctggatattttcatgctcacaggcaaacatttttccggtgcggccgaaccccgttgccacttcgtcaacgatcattaacacatcatatgccgtacacagctttcgtacgcctgccagaaagccttcaggcatgacgatcatgccggatgcgccttgcaccatcgattcaatcgtaagtgcggcaatctcttcgtgatgctttgcaagcagctgttcgagcgcgtgaaggcattcatcccggcactgtacggggtcgccgctttcagatctgtatacatacggaatcggggctttgtagctttcaaacatcagcgggccgtacacatggtggaaaagttctatggagccgacgctgacggctccgatcgtatcgccgtgatagccgttctgcatagaaataaacgtctgtttctcgggtttccctatgtttttccagtattgaaaggccattttcagagcgatttccattgcttccgctccgctgtcggagtaaaaaacgcgtgtcagcttttccggtgtgatgcctgtcagcatctcggcaagttctgttgcgggaacgttcgtcatacccagcaaggtcgaatgagcgattttttcaagctgtttttgaatcgcttcatccatttctttttttcggtggccgtgtacattgagccatactgaagaaaagccgtcataatattctttgccgctgatgtctttcagcatgatcccgtttccgctttcaatgattaacggatcttcatcgtaatctttcatttgtgtgaaaggcagccaaagatgctgtttgcttttttcgatcattgattgtttcatatgttcccctcccgctgaatgaatacaggctgcttctctaaaaaatggatacagctctccttatctatggagccatctgtaaagaaaatccggcatccgctttcatctccggcattcttcatctcggaaatccgctgatatcccagcttctttgcggcaacgtagcctgttatgtaatcagggtcatccgaccagcacaattcagcaataatccccggatgtgcgcaaacttttgccgcgatggcatgtgcttcttttattcgtgaatgttccggcatgttgtgagtaaaagcccatttttgaaaatcatgtgacggccaatccactcgggatacccgcacacctctatttcctctgccgtcaatgcgttttcctgcccggatatcaaacaggaccgcccctcttgcttctgcatattccgcaatgttttcgtacgctttctctatcatgtgcggggggatccccgccttttgcagaagcttgcgggcgattgcttgtcctttttccggcgtgtctgtttgatggaaagcaaccggcaaagggcggatcgtttcgatcggttcattaatgctttcaagctgaatctgcataaaatcaggtatccctcttgagtgcgagaagcctttatgtaataagccatctaccgcttcctgtaaaccgctgtaagtgatgagccgttctccgccggaaatgtgttttccgccctgctcatggggggcgtttcgggaagctctcattctgacgctgtaataggtttcttcccgcatatattcccctcctttctcatactttgaaaattaatgttaaccaaaatgaatttaaggttaactcttatacagaatattagtgccctccgcggaatatgtcaacctaaactatcaaaatgttaacttaatgagttttgcaaagcctcattacgttttcatgttttgttcatattttagtaattgtttattcaacactgtccgctaaagtaatccatatcaacaaatatgacagccatctgatttttttatgaagggaggtcaacaccggatgccgttatgctgaaagaaaaagtaaagacagcaggccgtttttgcactgtaggcgtcggcaatacgctgatcgattttggtgtcttctttcttctcgccgcttgtcatgtcccctatcttccggcgcagatctgctcctattcggcagggatcatcaacagctatgtatggaaccggaagtggacgtttcgtgtaaaacgcaaggctgacgggaaagagatcatgcgatttctcatgattaatcttgccgcgtcgggaatcacctttttgctgctttacgcgtttcaaaaaggcggctgttcgctattggtgagtaagttcgccgccactatcggcgggatgatgatgaattttatcggaaaccgaatctgggtatttggagattcgctgaaaaacatacaggatcaggagtgaagatgaatgagaaaaaaagtgagaaaagcggtcattcccgcagccggtttaggaacgagatttctgccggcgacaaaggcgcagccgaaagaaatgatgccgattgtcgacaaaccggccatccaatatattgtcgaagaggccgcagcgtcaggaattgaagatatactgattattacagggagaaacaaacgctcgattgaagatcattttgaccggtcggcggaattggaattcaatctgcaggaaaaaggcaaaacggagacgctgaaggaaatgcagcggattgccgatttggccaatattcattacatccgtcagaaagaaccgctcggattaggacatgcggtgctgtgtgcggagcattttatcggagatgagccttttgccgttctattaggtgatgatattatggtatctgacactcccgctctttcacagctcatagacgtctataaccaacacggcacagaaacggtcggcgtacagcccgtcgatcctgctgatgtcagcaaatatggtattatacagacggggcggcagagcggtcatgtgtaccaggttgaggatctgattgagaagcctgctgttgaaaaggcgccctctcatattgccgtgatgggccgctacatattaacccctgctatttttaaaacgctgaagacgatcggaagaggcgcgggcaacgaaatccaattgacagacgcgctgcgcgaagtgtgccgcacccgaagcatttacgcgcgggagcttgaaggaagccggtttgatataggagataaaatcggctgttttaaggccggcacggagatcgggcttcttcgggaagaaatgagaccgaaacttttagcttatttagaagaggtgttaaaaagagaatctgaagaaatcgtgcgttaaaaaataatttgtaaccattttgcttgtcaatcagtcatataattgggtaaaaagataaagaggttgtgaacagtgtgggcaattttattagtgaaatattatcctggctgacaagtatgggctatttagggattgcgctcggattaatgatcgaaatcattccgagtgaaatcgttctggcttacggaggctatatggtgtcagaaggcacgatcagctttatcggcgccattgtcgccggtgtgatcgggggaacgatcgcgcagtgctttatttactggatcgcccgttatgggggacggccgtttttggacaagtacggcaagtacttacttctgaaaaagcatcatgttgatgttgcggaaaactggtttcgccgttacggcgccggcgttgtgttctcggcgcggtttatcccggtcgtcagacatgcgatctccatcccggccggccttgcgaaaatgcctctttccaagtttgtcatattgacgacgcttgccattattccgtggtctgtcattttcgtttatctcgggtatcagctcgggggacagtggaaagacgtagacagctatgccggaatgtatacaactccgatcattatattggctctcgtatttattgttgtttattttgttgtgaagaaaatgagatcaagactatgaaaaaagactgcataagagcggctgcgagccggatctatgcagtcttttttttatttataccgggtatacggggtgtttccggtgtgtgaatgtcagttgtttggacatgtaagcagtgaggcgtttattgagttcttcccgcaaggaatcagcaggaacaatgccgtcaatcaccatttcagaggcaagtcggtaaaggttaatgtcttccttatattcatcacgcttttcttgaataaaagccggcctttcttcaggggctagctcactgattttgtttgcgtagaccgcattcaccgctgcttcaggacccattacggcaatttgcgcagtcggaagcgctaaacagcagtccggttcaaaagcaggccccgccatcgcgtataatccggcaccgtaggcttttctgacgataacggaaagcttcggaacagtcgcttccgccattgcggagatcatttttgcgccatgcctgatgatgcccgcctgctcaaccttcgttccgatcatgaatccgggaatgtctgctaaaaacagaagcggaatatggaatgcgtcgcacaaagcgataaattttgcggctttatccgccgaatcgagaaataaaaccccgcctttgacacgcggctgattggcgataatgccgaccggctgtccgtgaatccgcgcaagccccgttattaattcctgcgcaaataacggtttaatctcaaaaaatgagtcttcatcaatgacacgttcaattaaatccatcatgttgaacggtgcgttttgatgtgccgggatgacatctgagagcggtttttcaaaagctttcgggttcttagatttgttgacgggcgctttttcagtataatttgccggaaagtagctgagatatgtctgcgccatcatgattgcttcctgttccgtccgggcgaggagatcaccgcagcctgatacggaacaatgcatacgggcgccgcccatttcttcaagcgatactttctcgccaatcaccatttctgccatacgcggggaacctaagtacatggatgcattgccctcaaccataatgacaatgtcgcaaaaggccggaatgtaagcgccgcccgcagcggaagggccgaacaataaacagatttgcggaatgcggcccgacagctttacttggttataaaagatgcggccggctccccttctgcccgggaacatgtcgacctgatccgtaattctcgcacctgcggaatcgactaagtacaagagcggacactgaagcttttccgccgtctcctgaatgcggatgattttttccaccgttttcgcgccccacgagcccgcctttacggttgagtcgtttgccatcacacaaacggttctgccgccgatggtgccgatcccggtaacgaccccgtctgccggaagtccgtctgacatgcactcggcgaaaaaagcgtcttcaacggatatgccgtcatcgaataaaagcttcagcctgtctcttacaaaaagttttcccttcttttcgttgcttgcgtgatatttcgcggctcctcccttttcaatcgttttgctgcgtgtctgccgttctttttcgtaatccatccgagtccctccatgttttattttcctttgtattcagggggtcttttttctttaaaagcgcgcaggccctcttctctgtcaagtgtggggatgacttgttcatatgcttttcgttcgatttcgagccctgtattgagatctgtatcaagacccttgtttatcgcggcttttgcttgtctgacggcgatcggcccattagcggcgatgcgcccggccagtgcttttgctttttccataagttcatcggcttcacaaacatgctcgatcagcttcatgtcttttccctcttcggcagaaagccttcggccggtatagatcaattcttttgccgcgccggggccgataagccggggcagtctctgcgttccgcccgctccgggaatgatcgcaagccctgtttcaggaaggccgaggcccgcccggctgacggctgttctgatatcgcaggcgagagcgagttcaaggcctcctccgacagcggttccgttcagcgctgcaatgaccggctgcgggagagcttcaatggatgcggccgtttcaccgatacgcctgacgctttgcttaacttgttcatgattcatccccgctctttcttttaaatcagcaccggcgcaaaatgtgttcccggtgccggtgagaatgacacaacgaatggatggcgagtttttgatgtcttcaatcacacgctgtaagtgatcaatcatgtctgaagacagcgagttggccgcatgcgggcggttcagcgtgatcagaccgatcgtttcttgacagacggaatacaagacgcaatctcccatggcttctcctttctcatttcgttctgaatgcctgcaggtttctgcttggcaggtctttgcctattttatccgcgatccagcctgcggcataaagaagtttattcatgtccgtcccggtatcaatccccatttgttcgagcatataaatgacgtcttctgtggcagcgtttcctgctgatccaggggcgtacgggcagccgccaagcccgcctgaggaagtatcaaaggatgtgatgcccatatcaagagcgggaatgatattcgctagagccgttcctcttgtatcatggaaatggagtgcgatttttgaggcgggaattctcggcaaaagggcttcaagcacggctatgacctgcaaggggtttgccgcgccgatcgtgtcgccgagcgatatttcatcaacacccatttcgagcagggtgtctgacaggcggatgacttgttcgaccggcacgttctgttcgtacggacagccgaacacagtggacagataagctctcgtcgccattttttcagcttttgcttcagtaataacccgcctgagctcttgaacggtccggtcaatcggtttgtttacgtttttttggttatgggtttcgcttgcagataaaaatacacatgcctgatcgattccgccttctgccgcatgctccagtccgatgaggttcggaacgagagccgcgtagaccgtatgttcagatctggcaatgccttttgcgacgtccaggctgtcacgaagagccggaatccatctcggatgcacgaatgatgtcacttcgatatagggaaggcctgtttttgacagcatattgatccactcaaccttatcttctgtatccacccacgccgattcattctgcaagccgtcacgcggtcctacttcattgatgcggacatgtttcggacagttcatgctgcacctcccgttttattgaagttcaatcaggacctctccttcatcagtgaaatcaccttctgattttttcacttctttcaccgtacccgctgcatcagcgataatcggaatttccattttcatagattccaagatggccacttcctgtccttcttcaatgacatcacccggcttcacatgaattttccacaggtttcccgccatttgaatttttatgacgctcatttggatgccccctcgttcattgtttgtaaaaaaccggttgttgcctcgcccttttcaaacacttctgaatgagcaatttttgtcagtagcggaatgttggttttaatcccttctacatgatattcgccaagggcggttttcagttgttcaatggcttgttttctcgtattcgccgtgacgaccattttggcaatcatcggatcgtaaaacggagaaatgacgcttcccttttcgacggcgcattcgtgtcgcactgacgggtgtcttaaaacggaaaaagacgagatggtaccgggtgacgggtaaaaggtgaccggatcttccgcatagatccgcacttctatcgcatgaccgcggtggttgatatctttctgcgagaaagtcagcgcctgcccagcggcaattttcagctgttcttccacaagatccagtcctgtaatttcttctgtcaccggatgctccacctgcagtctggtgttcatctctaaaaaatagatttgtttcttttggtcgacgagaaattctattgtgcctgcattttggtagccgatcgattttgcggctttaacggcggtttcaccgagtctttgtcttaattcatcgtcaacaaacggcgacggcgcttcttctatcactttttggtggcgcctttggactgaacagtcacgttcaaacagatgaacggtgttgccgaaagaatctgcgagtatctgaatttcaatatgacgggcattttcaatgaccttttccatatacattgcgccgtctccaaaaaaggaggcggcccgcttttgattgccttcaaacgctttggccagctcttcttctgaatgtacgatctgcatgccgattccgcctcctcctgcggacgctttcagcatgaccggaaaaccgatggcacgggcttcggctaaggcggagtgaacatcgggcaatggctctgaaacaccgggaacgatcgggacctttgctttttgcatcgtttttcgggcttcaatcttgctgcccatcttggcgatgatatcaccgggcggaccgataaatgtgatttgttccttgcggcagcgttcggcgaacaggctgttttctgacagaagcccgtagcccggatgaatggcgtccgctccggcggatttggcggcttctatgattctgtcgatatgtaaatagctttcatttactctcgatttaccgatcggataggcctcatcagccgcttttacatgcagcgcgtcccggtcggcttctgaatacacagctgccgaggggatgccgagacgtttgcaggtgcggataattcgtaaggcgatttctcctctgttggcaatcaggacttttttaaacaaatgtgaagcactcctttttcattaagttaacttgagctcttcaatcgttttttcccgcaacttgaatttctgaatttttcctgaggctgtcattggatattcatctgtaaacaaaacatacctggggactttatagcgggcgatatgttctttgcaaaaggttctgatgtcttctgcggaagcggtttgtccgtctttgagcctgatccacgccgcggcctcttctccgtatttcggatcaggaacgccgacgacctgaacgtctgctaccgcgggatgccgatataacatttcctcaatctcgcgcggatagatattttcgccgcccctgatcagcatgtctttcagacggcccgtgattttgcagtacccgtcctcgtccatgaccgccaaatcaccggtatgcagccagccgtctttgtctatcgcttcttcggtcgcttcttgatttttataatagcctttcatgacatgatatccgcgggtgcagagctctccttgttcgccccgggcggcttcttgggatgttccgggccgaacgattctgacttcgatatggggaagcgcgcgccccgctgtttccactcttctttcaaacggatcatctgttcttgtctgcgtaatgacaggtgatgcttcggtctgtccgtaggcaatggtaatgtcagtcatccccattttgccgatcacttctctcatgacttccgccgggcatggcgagcctgccataatcccggttcggacgtgggaaagatcatattcagaaaaacggctgtcatttaggagggcgataaacatcgtcggtacaccgtgcagagccgtgcaggcttcttgctccaccgttttcagaacggccggcggagaaaactgttcgatcggaatcatcgccgcacccgcggaaacacatgccagcacgccgagcacgcacccaaagcagtggaaaaacggcacgggaatacataaacggtcacatgaagtaagcttcatgcattctgcgatattggccgcgttatttacgatattaaaatgtgagagcatgacgcctttcggaaatccggtcgtacctgatgtatattgcatatgaatgcaatcatcctttttcaggctgtccatccttccgtcaagcgctgcatccgttacagactcggcattatccagcaatgaatcccaacggtgcatcccgggcaggcttttatcaccgatatataacaccgtccttaaaaagggataacgtttcgaacgcagcctgccgcgctcacaagttttcagctccggaattagcttattcaccatctcaacataagatgtctgccggtaggaatccatgattatcaaggccgagacgtctgaatgcgccagcagataatcgagctctgcgatttgaaaattggtattaatggtgaccagaacggcgccgattttcgccgttgcaaattgcgccgcgagccattccggaatgttggatgcccatatggcaacatgatctcctttttcaactcccagcttcatcagcccttttgcggtttgccggcataaccggtcaaactcggcatacgtataacgaaggccgcgctcagggtaaacaaccgcttcacgatccggaaaaagctccgcggtccgctcaagcagctttccggctgttaaatggataagttcagccatatgacctgccccccttccatccctgtcttagtaaacgttttcatttcacttcaaaagctgtcttgcgatgaccattctttgaatttctgacgttccttcgccaatctccatcagctttgcgtcacgaagcatacgttcgacgccgcattccttcatataaccggaaccgccatgaatttggatggcctgaaggcatgttctgacggccatttctgaagcataaagcttggcgaatgcagcttctttcgtaaatggcaggttttgatccttcagccatgccgctttaagcaccatctgtctggcaaggtcaatttccatcgccatatcggccagcttaaattgaatggcttgaaatgacgatatcggactgccgaactgcttgcgttccttcgcatatgacagcgatgcctccagtgcgccttgagcgataccgacagccagtgccgcaatcgagatccgcccgccgtctaatgtatataaaaattgtttaaaacctttttcaggatcaccgagcaggttatcggcaggcaccctgacatcctccagcacaagttcggccgtatccgaccctctcacacccatcttgtcgtacggatttgtgatcgtaaatcccggtgtgtctgtcgggacgatgagagctgaaatgatcggttttccggcggagttctttcccgtaacggcggtgacaatgaccgtgcgggcgtaatttgcgtttgtgatccagcatttctctccgtttatcacatagtcatcgccctttttctcggcttttgtctgggttccgccggcatcggaacctgcattcggctctgtcagcccgaatgatccgagcgcttttcccgaagcaagcggaataagatgttcttgcttttgctgttcagtaccgaaatagtataatgggcttgcaccgagtgacacggccgccgcgtagctcagccccgtgctgccgcaggcttttccgatttcttcgaccgctgctgcatatgaaatggtgtcaccgcccgccccgccgtattcttccggaaacggaattccgagcagcccgagttcgcctatttttttaaatgtgtctatcgggaagacggctgattgatcaacctcatgggctttcggggcaatttcatttttggcgaaatctctgaccatttcgcgcaccatctgctgttcttttgtcagttgaaaattcattaaccttcctccttctgctgctttctacattttattaatgggggtctttattcattccatccaaataaagtctgaacattcggactcatccgccgcaaaaaaactgacagccccgcaactgtcagttttattaataatggctatttaattgtccgttttgcggagggacggctctcatggtgaagcctgtcaacggaagtaacgatataggtgcaggctcctttcgcccgagtatcagtatctgaaaatgtctgcgtccgtgacgatgtttttctgactgtatccactaaataaggctgctttcccttttctgcgcggtaaacggcgtaataagccgtttttttaccgttggatttcgcatcttcgatatagagtgtatggcctgaagcgttcttctccgcccgtttgacagccggtttttttaaagcggaatgtccgagccaaggcatctcgggaattaatgcgggccggctgtacatgtctttgatcaaacggttttttacatcgagcggattacggtttaaatcctttaaactgaaatgcatgctgccttttatccatgctgatcccctgttaagagcaatctgtcttccgtattcccccgggtcggcccaggccggatcagcgttgttgttgattttataagctgcctgcccgatatataaatgcaccggccgattgttcacttcttttccccaccaatccgctaagacgtcatatgccgccgctttaaatccgatgctccagtaaatttgcggtgcgatgtaatcaatgtatcctttttggatccattctctcgtatcagcatataaatcatcatagttccgcacccctgcggccgtttcggagcctgtcgggtcatctgcggcatttctccatacgccgaacgggctgattccgaatttgacataaggtttttctcgtttgatggtttggttgatttcttttacaagccggttgacgttatccctgcgccagtcatcaactgataaaaagtgagcttttccgtaccgttcgtattccgcctgatcggggaattcctgtccggcaattttataaggataaaaataatcatccatatgaaccgcatcaatgtcataacggctgaccacctctttgattccatccgttataaattgtcttacttccggaatgcccggattatagtacagctgttttccgtatgcagcgacccagtccggatgcgaacgcgcgggatgatcatctgaaagcgcattcaaatttgtgtgattcatcgtgattcggtaaggattgaaccaagcgtgaaattcaagattccgtttatgtgtctcttcaactaaaaaagcaagcggatcgtagccgggatttttgccttgtgttcctgtcagatactctgaccaaggcccgtaatctgatggataaaaagcatcagccgcaggcttaatttggacgataacggcgttcattcccatctcctgaacgtcatccagcagcttgctgtattctcttttttgctcttccggtgacagcccttttttagagggccagtcgatattggtgacagacgcgatccatacggctctcatttctctctccggctgagtgccgcttgcttgtgcggatgctgagaatgtaaagatgccggctgtcagtacaacggccaaaaaccatatcatgctaaaacggcagcttttcatgtttttccccctctctgctttacggtattccgaagcattccgggcggtgaatcagaaagcctgctttgctcctctcagcctaaaagggaaagaaaaaagtcctaaagcgaatcaaaacgcttcaggactttttatgtttcatggcggcgagcacgtcaatgaccttcgttccgacgccgacacacgtttcaagaatggcctgcgctccggcgatggacaaaatgaaaataaccggatgtgcatagcggggccagaccaagtagcagatgccgatcaatatggcgcaccagacgcccgcacaccaataacattgcagcatataaccgaatgcggaggaaggaacttttttttggacggcgcgcccgttttgatcgacggttttttcttgctttataaagggttttcttatgaattccgtaatcttatcaaatacgatcaaatgggtcagccggtagctggcaagaataatcattacatacgtaagccaagataggttcgtcatgtcaaagcctccaaaaaactggtttgattcccctatcttgccctctgtcatcctgaaccattctgccggatgttacagattccgcgccaagcgtcttccgctgtttgcaatgatgtcgagtatgacctcagcattttgctgtgcaaaggcgggttcaaacatatctttatgggcgccctcgccttgatattcctgatagagtcccgttgtggcgccttcccatttcatcggctcggtcttatcactgtgctcttcctttatgccggcctcgataaaatggaggtttgccgcgatttggccgtcatttatcagttccgcccagtacgtttgatagcgctctgtttttcggatgaccgcttccctgacggcttccgggacattttcggctgttgcgtttgttggctgcggcggcaatgtgtcaagctttctgtacgcgtctgcgataatgacgtcgctgatttctaagccgcgcttttccatcgcttttgccgcctcgaatgccgtattgccgcctgccgaatatccgaagagtatataagggccttccggctggatttccagcattttatcaatgtattgttccattctgctgtcttcttcaataaagttaaaaccgtacacagcagcccgtccatttaatgccgccgcaagatctttaaagaaaatgccgaaacctgagataggcggaaaacagaaaagattgcggcctttcgactggttcagtctgctgatatgctgctctgcagcttctgtcagtgtgtttgaatacagcttttcagccaattgttcaattgtcggatattcaaatatcatttcaatcggcacatccatctgctgcctggtcttcagctgatgaatcacttgcaatgctttcaaagaatggccgcccagctcaaagaagtcatcctgtatgcccagctccctgcagccgaggatcggcgtccaaatgtcgatcagctcacgctctacccagtttcgtggcggaacggcttttgatgacgtttttttccgttccggcgcaggcagcccgcgacggtccactttgccgtttgcggtaagcggcatacggtcaagcttcatcacatactgaggaatcatatagtcgggaagcgacctggccaacagggatcgaatggctctttcttcaacatgtgcgcctgtataatacgcacaaaggattgcttcttgtccttcttttgctacgatgactgccgattccctgattccatcaatttcagtcaagcgtgcttcgatttcggccggctcgatccgcttcccgcgaatcttgaattgacggtcgatacggctgatgtatccgatacttccatcaggcagccagtgtgccaagtcgcctgttttgtagatcttttcttcagggtgaaccgggtggctgacaaatgcttcacttgttaagtcaggcctgtttaaatagcctttggcaaccccgtcaccgccgacacaaagctcaccgggcacgccgatcggcgcaagtccgccatttttatcaatgatatacgcagctgaattgctgatcggttttccgatcgggatcggctgagaaaaatcgtgcctgatttcgtaaaaggtagaaaatgtcgtattttccgtcggtccgtatatgttataaaggctgagattcggacagcggtgtctgaccttattgatgagcgccggggacaaagcttctccgccgacatataaggtgtgcaacccagaaaacatctccggatctgcctgggcgaactggttaaagagcgccgtcgtcaaaaacagaatcgtaatacggttggaagaaagataattgccgaacctctcaggggcaagcattgtcgagcggtcaaccacatgaagacatgctccgttcaaaagtgctccgaagatttcaaacgtcactgcgtcaaaaccgatggaccctgtcagaatgagacggtccgacatgccagccgacgtgtaattgctgtttgacacgagcgatatgacgtttcggttggaaatcatcacgcccttcggttttcctgttgaaccggatgtatacataatataggcaaggtcatcaggtgctgtatcggtattcagttttcccgcatcaggtgtttgtttttcagctgcagccgggatagagatgatgtgagaaaagtcaatgtcagtctcaattcctttttgtaccgttaacagctgtgctccgctctcagtgagcatatcggcgatcctgtcggttggcagttctgcatcaaggggaaggtacgtccctcccgctttcaatacagcgagaacagcgatgataaattccggtgagcgttcggccagaatcccggcaattccctttggcgccaaaccgttttccagcagggtgcgggcgaatgcagttgaccgttcatcgagctccctgtacgtcatcgtcagcccgccggcgtgaagcgcctgatggtccggggttttcttcacctgtcggctgaacaggctgatgatgctttcatctctttcataagttgttttcgtgtcattaaattcgccgattattcttgatttttccttttgtccgagcatcggaagccgatcagccggaacatcgggattgaaggcggcgccgcgcagagcttcttccaagtgtccttttacgctctctatccatacttcgtcataaacgttcgcattgtagctgaatttgatgagcagctcatcgccaggcgctatgatgaggttaaaatcgtagcccgattgttccgaaacgttgacattcccgatccggaatggtgcatccgattccttttccgcgtctttcatctgctgctggatcggataattttcaaacacgataatatggtcgattaaatcctgtttcagctcagtctgcgattggatgtcagcaagcggatgatagctgaacgcctctgaatcaagcatttctttctggcagcggcccagcagttctctaaagctttcgtcacccgttttaatgcgtaccggaacggtattgataaacagcccgatcatgctttccacgccgtcaatgacggaaggccgccctgatacgacggcgccgaatacggcatcgtccgtccggttgtagcgctgcagcatcagaccccatacagtctgcataagaacagcgagcgtagcgccctcttctttggcgatggttttcagcctgtctgtcaggttttgatctaaagaaaacagcagctcttccttgcggtagcctttttcctggggacgggccgatattttcgggagtcctgagggtgtctcgcagcctgctaaatatcctttccaatattcagaagccgcgtctttgtcctgatcagtcagccatgtaatataagagctgtaaggctttgcgggcgccagtgtgacaggtgagcctgtttcaatcgcccggtacatatgcatgaattcttgaaggacgatgccgaggcaccagccgtccataaggatgtgatggtggctccagacgcatacatatttttcgttagccgttttaaacaaagaaacgcgcatcagcatatccttttgcaagtcaaagccttttaagcggtcacgttccttaaatcgctgtaaatagatgctctgttccgcttcgtccaaatgtgtaagatcttcgcggtgcagccggaattcccgctcacgcagcacaacttgacgggggccgttcagctgagcgacatgaggtaaaaaaaccgttctgaaaatatcgtggcggctgatgacagactgtacgctttgctcaaacaattccggacgaagccggccttttatggtgaaaacggattgctcgatatatgcagccccctccttttgcagaaaggaatgaaaaagcattccttcctgcattcggctgaggggataaatattttggatattttttgttttgtccatgtgttcctcccgctcggtttagtggaagctgagtaagtcggcaatatcctgcaaggcttcctcagtcagctcccgatcatcaaagtcactgacggtcttctccgtatcggttttgctgaggcagtgttccgacagtttcaggagataataccggcagctttcggacagccgttcgatcgtatcttgccggaagcgctccgtttcataggaaatgctgacggtcatccggccttttgccgcaatcgcgctgatttcaagtgactgctcccgtttccatgtatctgtcacatcatctccgcctcccaaaggagaaaactgaaacgcgtcaggctgttccgtttctgccgggttcccgccgggcgcatcgaattgtccgagataattaaagctgatctccggtgctttcccgaaagtcatcccggcaagcttcggcggtgttaaatatttgaggacgccgtatccgttccctttatccggaatgcgccgcaatgtgtctttgacggttttcaatgtgcgaatttcattttcttcaagaggttcataaactccgctccggaaaagcaccgggtaaatggaagtgaaccaccccactgtcctgctgatgtccgcacctgcctgctccgattggcgtccgtgtccttcaagggcgattttcaaagcgtgccgcggcgaccacttttgaatggcaagcacggcggaagccaaaagcacatcttgcgtatccgtattgtaggcactgtgcacatctttcaacagggcgtccgtttcactttctgtcagagtgaaggataccgtgttccgtttttttgcaggagtttgagataaatctgcctgttcgtaaggaagactttctgtttcatagtgttcaatctcccgccagtactccgcctgctgaagaagctgtttactttcggcataatcggccagctgctccgtatatgttttgaatgacatggttttcggagggagtttgatttcctgtccagagatggcctgttcataagcagaagccaaatcttccaataaaatccgccatgatatcccgtcgacagcgagatgatggaccgtcagaaacaagtaatcttctgcttcagagcggaacagccccgcctgtaccagcggcccgttctctaaatccatgtttctctgaagctctgcgacgcggcgttttacaaaacgttccttctcatgctcattgtcttccatttctaatatggtcaggctgtaaagctgttcatctgcgaggtcagccggtctgttgaagaggagaagacctttctcttcgtcttttttgcagacaatgcgcaaggcatcatgatgaacggtaatggcttttaacgttttcctcagagcctcttcatctattgaatttgctctcgtcagcatgacggactggttaaaatgatttgcttccttcatgtcttgtgtgaagaaccatttgtgaatcggcgaccacttcacttctccttctgcaggagcttggctgaccggctgccgctctgtacggacataaggcgccagctccctaattgtcggccggctgaaaatatcttttacggcgatctgttttcctgcctgatgtaatcgggctgatacttgcagggctttgatggaatcgccgcccagttcaaaaaatgattgatccgcggcaatgttttcagttccgagcacttcgctccaaatcgcggaaagttctttttccatgtcgctttcaggctcggtaaatgcccgtccggtgtgcgcttttttccgcggctcaggaagcgcgcggcggtcaagcttcccgttcggtgtgacaggcagggcttcaagtgtttcaaagaacgccggcaccatataagcgggcatttcatttctgagtgcttgctgcacagtttcactttctgttccttcttctgtcacgatataagcgcatagttccgtttggcctgctgatgcggtatgagcggtgacagctgcttctttgacaccttttatgcctgttaaggaggattcaatttctttcagttccacccggtagcctctgattttgacttgctcgtctattcggccgatatattgcagcgtgccgtccggcagccattttgccatgtcgcccgtgcggtacatgcgccggttcttctggaacgggtcttggacaaaggcttgggccgtttgcttaggaagattgcggtaccctcttgcaaggccggaacccgagatgcaaagttctcccgttacaccgatcggctgcggatgatctccgtttaaaatataaacgtgtgaatgctcaatcggacggccgatcgtaatgttctcactttgttctatatgtcttgccgctgtagtggcgacgctgttttccgtcgggccgtactcattggcaagctccgtgtgtggacaaactgataaactgcggctgataatgttttggtcgacagcttctccggctaatgtgacaattctgagagactctgcatcccccggctccagtacgtcaagcagtgtacggtacagtacgggaacaatgatcatgtgagtgatgcggtaagatgcaagatagtgtttaatagcaagaatatctcttgcttcatcttcggctaaaacggccgctttcgcaccggaaatcagcggtgtgaacatgcttgttacaaacccgtcaaaggaaaatgaaaagagctgaagaatcgtatctttctcattcagatcataaaatccgctccgccattgaagggtttggctgacggatcgatgttcgaccataacccctttcggcctgcctgtcgttcccgatgtataaatgatgtaagccaaatcttccggtgctgataatgactggaccggcgaagcatcctgttcttggatatcctccagtgcgagcacttcaccgttaaaacgatcaggcacttgttctatcgcaccgtgtgcggtaaggagaagcgctgtgccgctgtctgagatgatatattgcttgcggtcctccggatattcaggatctatcgggacgtaggctcctccggctttccaaaccccgaagactgccgctacttgttccggcgatcttggtatcacaatgccgacagctgcatcaggtccgatctgccgtttttgcagggctctggcgattttattcgaccagtcatctaattctttgtatgtgatcaatgtttccccgctgataagggccgcggcatcaggtgtttttcgcgcctgggtgatgaacagttcatgaactgttttttcaggcagctgttgatccgtcatgccgttaaagtccgaaagaatccggttccgttccggagcagtcagcatgctgatcgcttgtaaagaagtttccggttcacggacaatgtgttcaagcatcgtcataaagtgggaagcccagcgctgcatcgtttctttccggaataaagacgccgcatattcaaacagaaaatgaatctgtcccccgccttcagaagcctgcagagtgacatcaaatttggaaaccggacgggacacgtccgcattctgaatatgcaaaccgtccaacagcagttcctcatgctctatattctggacgacaagcatggcgtcaaacagcggattgcggcttgtgtcccgctgcacgccgatccgttccacaagctcttcaaacgggtagtcctgatgctcatacgcttcaagcgcggcttggcggacttccgtcaagtaatcggtaaaccgtttgtctcctttcggctccgttctgatggccagcgtgttgacgaacatgccgagaatcggttcaaggtctttgtgcggacgcccggcaatcggggagccgacgatgatgtcttcctgcccgctcaatctcgcgagtaacgtattgtacgcggcaagaagcaccatatacaaagtggagccgtgatcccgggcgatgcggtgaaggccggatgccgtttcagcgtcaagcgcgcacgatacgctgccgcccgcaaagcttctgacagccggacggggcttgtcagccggaagctcaagcaccggaagctctccttcaagccgcgtcagccaataagcttcctgcttctggtacccttctttctcctgaaatgaccgctgccagacggcatagtctttatattgaaggcgcatcggcgcaagcgaacggcctgcgtacagctcgccgaattctttaatcaaggtgttgacggacacaccgtcagaaataatatgatgcatatccgttaataaaagatgacgttcgtctgattctttcacgagggccgcacggaagagcggcgcttcctccagacaaaacggccggacgaatgcgtcagctgactcggcctcatccaactgaaacggcacgctgtcatggatgcgctgcaccggttcgccgtcaggccccgtttcaaaggacgttctgagcgactcatgccgctcaacaagctgccggaacgtctcctccagccggccgcggtcaagcgggcccgtcagttccagcacagccggcatattgtagccgacaccgccgtcttcaagctgctggagcacatacatccgtttctgcgccgaagacaccgggtaggtgtcctgtgtttgcgcaggctgaatcgcttcatacgggctttcttccaagtcctgaataaccgaagcgagctcttccaccgtcggccgggcgaagatgtcctgtaacggcacctgaacaccgaactctttggcgatgcgggagacgagagccgtcgcttttaacgaatggccgccccgctcaaaaaagtgatcccggatgccgacggggccgtttttcagcacctcttcccaaagggcgcaaagcttcatttccgtgacgttccgcggggcggtgtacgcttgtctgtctgccgctccgtcgggagccggcagcgcgcggcggtcaagttttccgctcggcgtgaccggccattcgctcatctctataaactgagccggcatcatgtaggccggaaggcgtgtcgcaagctccgcccgcacatcatcactttcccgtccttcgatataggcgtaaagcgcggtttcgccgtgttcggtccgggcggtgaccgcggcctcacgaatgccgtcgatgcgccggatcaccgcttcgatttcccccggttcaatccggtagccgcggactttcacctgtccgtctgaacgtccgagccattcgactaggctgtcttctgtccagcgtgcgatatcgcccgtctgatacatgcgttctcccgggtaaaacggatcattgagaaagcgctcctccgtcagctcaggccggttcagatagccccgggccacccctgtccccgcgatgtacagctctccgatacagcccggcggcagaagctgtttcttttgatttaaaatatacagccgcatgttatgcccggaaatgccgatcggaacattgtgaaattcttttccttgcggcaaatcaaagtacgccgcttctactgtcgcttccgtcggaccgtaggaatttgtcaattccgttcccgcaagaaggtcatgaaaacgggaaaccaggtgcgggcccagttgttcgccgccggcaaaaaccctttttaagcaggtttttttgatcggctgttttctggaatttatatattccaagaaagcatgaagcatggatggcacaaaatgagccgccgttatgcggttattctccaatgcgttcagtatcatttcagggtctttctcgccgccttgcggaaggaggaaaacagaagctcccgcgatcggccaccaaaacagctcccaaatcgaagcgtcgaaagagtatgatgttttatgcaaaatgatgtcagaatcacttaatccataacgcgtttgcagtgagtataaaaagtttacggctgaccgatgttcaacctgcacgccttttgggcgtcccgtagaaccggatgtatagatgatataagccaatgaatcaggttttaccggaacgttagggttggccgcagcttcagggtttcctgtttgtccgcttttcagagagatcgtttctccctcaaaaagatctggtgcgaaaagttctggttctgccagtaagaatttcacgccgctgtctttcagtaaaaagcgaatccgctcttccgggtaatccggatcaatcggcagatatgcaccgcctgcttttaagacagcgtaaatgccgatcatcatgtcaggagaacgtcggcccataatggcagttttatcctccagccttatcccgcgcttgatcagctggtgcgcaagctcgtttgccctttcgttcagttcctgatacgtaatcgaaatgtcatcagttaaaattgccggacggtccggcgttttttccgcctgctgttccagcagatcatgaagagactgatgaagcggaaacgctgttttctgcaaggggctgaaatcttgaagcagagacgcttcttctttttctgtcaaaacagaaatatcgtctaattccaagcccggatcagccgcggcgttttcggcaagtgtcgtaaaaaatcccgcccatttttgaatcgtttttctcttaaacaaatcggtgctgtattcaaactggcagtataattcaccggcgttttcagagatgtacagcgataagtcaaatttagaaatcggcaggctgacgtctgccggctgcagttcaagtccggctgccctaagcttctgctgttccatattttgcagcgcaaatgttgtgtcaaacagcggatttcgggacatgtcacgcggcacaccgagcttatcgacgagctcttctaacgggtaatcctgatgttcgtaagcctcaagcgctgtttggcgaatttcctttaaatattctttgaatgtcatgcttccgtcgggacgcgtcctgaaagcaagcgtattgacaaacatgcccagaacggcgtcaaggtcggcatgaggccttcctgcaatcggagacccgacaatcatatcttcctgtccgcttaaacgggctaacagaactgtgtacacaccaagcagcgtcatatacagtgtgcatttgttttctttcgccagctttttcaactgagctgtatgtttttcattgatgacaaatgacacccggtctccggaaaagctccgcaccgggggacgcggcttatcagccggcaattcaagcacgggaatctcaccggcaagccggttcagccagtactcctcttgtttccgatatgcggcgcccgccataaatgattgctgccagacggcataatctttgtattgaatccgtaacggcggcagacttctctcagcatacagctcactgaattcacgtatcaaaagattgacggatacgccgtctgaaataatatgatgcatgtcagctaaaagcagatgccggtctttttctatttggacaaatcccgcccggaaaaggggcgctttgccgagatcgaacggccggataaacgcttcggctgattgttcttttgtaaatgcaaacggcacgtcgtcatgaatcctctgcacgggcaggccgtttttttcttcaaaggacgttctgagcggttcgtgccgccggatcagatccttgaacacggcttccatcctgtctcggtcaaacggccccttcacctctaaaacggctggaatgttatagctgacaccgccattttcaagctggtgaaggacgtacatccgtttttgggcggatgagacaggatatgtttctttcatttctgtcttttctatggatgcgaacgggttctcttctgcttcactgatgattttggcgagttcttctacagtcggatggctgaagacatcgctcagcgggatttgcacactgcactctttagctatttttgcaacgagtgccgtcgcctttaatgaatggccgccaagctcgaaaaagtgatcgtgaacgccgatcgggccgctttgaagcacttcttcccatatgcgggtaagcttcagctccgtcacattccggggagctgtatattgacggcccgctgcgtacgccgaagcttccggaagggcccgctgatcgacttttccgttcgcagtgagcggaatcgagtcaacaaaagcccatttgaccggaatcatataatcaggcagctctttcgccaaatctcttcgcagctgagaaggatcagtcgcttgtgagacgctgcagtaggcgcataattcattttcgcccgactcattcgtttgaatcagaacagcagcttctttcacggcatgatgatttgccaggacagtttcaatttccttcggttcaatccggtaccctctgatcttcacttgatcatctgtccggccgatgtattcaatttggccgtccgcacgaagtcttgccaaatctccggtccggtacatgacggcgtccgttctgaacggatccggcaaaaatttctcttcggtcagcgccggattgttcacatagcctcttcctgtattcgggccggaaatatacaattctcccgcaattccgagaggctgaagctgcctgtttttgctgaaaatatacatcttgttatgatggatcggtttcccgatcggcggatgttcaggtatgtcatctcccgcagaaatcgtatacgttgaaaccacatgagtttctgacgggccgtaatgattatgcagatgcataccgtgtaaacggagcgtctgcctgaacaaacgcgaaacggtcagctgctccccggccgtaatgacatgcttcacacagcggggaaaagaatgtgcataaccttcttcattgaaaagcatcttgacaaacgcagtcgggaaaaacacaacttccgtgttgtgctgatcaataaaagaaaacagctgagaaacatcccgtttgattgattcgggcacgatacaaagggtgccgccgctcaagagtactgaaaataactcctgatagcagacgtcaaacgccacagatgcgtactgcagcacatttgtgcaaaaatcaatgtctgtgttcgtcaattggtgagaaagcaggttggccatatttttatgttcgagcagcacacccttcggtttccctgtcgttcccgatgtataaatcatataaaggaggtcgtctgccgtattaatggattgcacattgcttccgtccgcttccgtcccggcgtcttctatgtatgtaacctgcagcgtttgttccgcgggcactgactgatgccgctctgttacaacatggacgcagccgctgttttcaatgacatatcgaatacgctcctttggactgcccggatctatcgggacaaaggcgccgcccgcttttaaaataccgagaacagccgccgctaaagaaggggaacggccgagcatgacgcctgccggttcctcccgctttaatccgcgcttttgcagcaggcgggccagcttattagccgattcgttcagctctttgtacgtcactgactcaccttcataccgaatcgcgatttgatctggtgtttttgcaacctgccgttcaaacattgcatgaaccgtgtcatattcaggcttttcggtctcttcagaaatcggcgcaagcagctgcgctttttcccctggagtgatgattgcaagcttgtccggcgtgatgtccggtttgtcgagaacctgggagacgatatgtgccaaatggcctttgatattttcaataaattggcggtcatacacgcttgaatcgtatctcattttcaaatgaatctcgtcacccggcgccaccatcaggtaaaaactgtagttggtttcgtcttccatgctgaaatcatggatgtgaaaaaggtctttcgtgtcccccttgctgttcagcacatcaagctcctgttcaaccggataattctcaaagacaagaatatgatcaattaagccttgttttacctgtgaattcgcctgtatgtcataaagcggatgatagctgtatgcctgtcctttcaaagcgtccttttgcacgtttttgatcagcttttgaaacgggatgtttgccccgctgatccggacaggcacggtattaataaacaggccgatcattcgctcgatgccttcgatttcagacggccttccggaaatgacagaaccaaaaaccgcatcttctgtctggttatacgcctggagcaaaatgccccagagcgtgtggaaaatggtgctcagcgtgacctcttcttttacggccagctctttcagtttagccgtgtcctcttttgaaaaggaaaacgtcacttcctcttgtctgctttcgccggcttttttctgcttcggcagtacagtctgctgctcaaagccttcaaggtaccgctcccagtacgaagcggctttttctttatcttgctccatcagccacttgatgtaggtcccgtacggcacagcgggctcaagcgttaacggtgtccggcggagccgcgaggcgtatatctggaagaactctttcagcacgattccgagacaccagccatccataatgatgtgatggaaactccatatgcacgtatattcacattcaccggtttgaagcagcgtcacccgcatcagcatgtctttttgcagatgaaaccctttcttacggtctcttcgtttggcttcttcaatatgcttgatttgatcagccttgtttaaattggtgagattttcctcaatgatgctgacgttccgctcttttaatacgacctgctgcggcactgacacgttctggctgataaagatcgttctgaaaatatcatgtctttcgaaaagggcatgaacgctctcttcaaacacgcgggtgtcaaccttccccattattgaaaaggaggcctgctcggcgtaagcctgtgattccttttgcaggagggaatgaaaaagcattccttcctgcatataagacagcggataaatatcctgaattgcattcttttttgtcatgttataatctccccgtcgcctttttctacagttcctcgacaaaactcgctatgctgtccaaatcatcagatgttaacgttttgctgctaaaatcactaacggttttttctgcttcctctttgccggtgcagtgcgccataatatcacgcaaatattgctgtaaagtttgcagcagctgttccatcgtttctttgcggaagcggctcggcggatagctcaaactgaagtgaagtttgttttgtgcggccatcgcgctcatttccaccgcttgttcccgctgccatgtcggcgtgatgtcgtgcccgcttgcaagaccggacagactgaacgtgtgctgatcttctgtatcattgaattgccctaaatagttaaagctgatttcaggcgcttgtctgaagcggattgttttttgttcaggcggtgtcatgtattttaaaatgccgtagcctattcctttatccggtattcttccgagtgtgtctttgaccgtttttaccgccgttccaagctcagcgcctgctgtgttcaagtcaatgagcaccggatacatggaggtaaaccagcctacggtgcggctgatgtcgagctccggcatgatgtgctctctcccgtgcccttccatcgcgatgcgcagtctgccgccccctgtccagtcccgtaaagccaaagctgcggcagtcagaagaatatcttgcgtatcggtatggtaggcccggttgacctgctgaagcaaaacggacgtttcttcttctgtaagcgtaaagcttaccgtttgccgaatgctgtcggctcccgtctgatgctgcggtttttcataaggaagttcggcggctgtttcttcttcaataaaacgccaatattcttcttcacgcatcagcttgctgctttttgcgtattctgaaagcctttcagcgtattgcttaaacgaatcggtttttggcggaagctgaaccggctgaccttttacggcttgagtgtaagcggctgataaatcctccagcaaaatacgccatgacactccgtcaaccgccaggtgatgtatggtgatgaataaataatccccggaccgggttttgaaccagccggcttttaataacgggcctttttcaatatccatccgctgttggagcgcagccacttcagtttctatttctctttcccaagtatctgtctcagacagatcccaaatgtccaagctgtacagttcatctttttgaataccgtgattgatttgtctgaaactttcgttttctgcactgacggtgatccggagtgcatcatgatgaatgacaagatgctccaaggcttctttgagcggctgtttatgcaatgcgtcagagctgaacatcatgacggactgattgaaatgatttctgttttccatccgctgtgataaaaaccagtgctgaacgggtgtccaaggtatgtctccttccaccggccgctgatcgatgactctttccgctttccggataagtggcgcgagctccttaatggacggatgccggaataagtcgcttgccgtcattttccacccatagcgtccgagtcgtgcggaaacttgcagcgctttgattgaatcgccgcccaactcaaaaaatgagtcctcaatcccgacttgttttgtgccgagcacttcctgccagatcacggaaagctgttcttcaagctcattgcggggagctgtgtacgcggtttgaagcgcgagctccggttcgggcagatttttccgatccaatttaccgttcggcgtaagcggcagcttctcaagttccatcatataggccggaaccatgtaattcggcagttgcttagacagtgaagaacgcactttttctgtatccatgtccgcatgcagactcatatatgcgatcagttctttattgccggactgcccggttctgactgacacggcagcttctttcacgccgtccaggctcctcagtgcggcttcaatctctcccagctccacccgataaccgcggattttcacttgatcatccatccgcccggcatattcgatcgttccgtccggcagccagcgggctaaatctccggtgcggtacatccgttctccgggaacaaaaggattagggacaaatttttcttccgtcagctcagggcggccaaaatatcctcttgccacaccgtctccgcccgtgcacaattcgccgatgacgccgatcggctgcggtgttcccctgctgtttatgatatatgcggttgaatttccgacagggcgcccgatcgggattgaatgatcgtatgattgttcaatcaaaaagcaagtcgagaacgtcgtgttttcagtcggtccgtatccattccatactgagagatgcggcagcgcattccgaacccggtttacatggctcggggacagtgcttccccgccgataatcaatcgggataatccggaaaacacgtgttcattttgttctgataaatggttgaacagagacgatgtcagccacagtgtcgtaatgccgttttgctgtataaatgtttccagaacatccgagtcgagataggtttcctggtcacttacatataaagaagcgccgtttaagagcggaccgaatatttcaaatgtcgtaacgtcaaatcctaatgatgaagtaaacaacagtctatcttccggcgtaaaatcgatataattgctgtttttcacaaggcggatcacgcttcgctgttcaatcatgacgccttttggcgcacctgttgacccggacgtataaatcatgtaggccaatgattcaggtccgccgagcggttcgggattttccgaactcaagccggcctttgtttgaatatcctctatgaataaacgttttcctgaaagcggcagaccgtcaagtttatcagattggagaagaatatcagctttacagtctttaagcatccattcagcccgttcccgcggcacatcgtcaccaataggcaagtaggcgcctcccgcttttaatattccgaggattccggaagcaagctctgttgtgcggccggttaataatgcgacaacgctttccggaccgacgccatttgatcggagagccgccgctattctgttagcccgttcgttcagctcacggtatgtcaagatttgtccatcatatacaactgcccgggcatcgggggtttcttttgcctgacgctcaaataaacggctgatggtttcgtgtcttgggtaatcgcttttcgtctgattaaactgataaatgacgcaatttgtttcagcatcatccagtacgtgaatgtcaccaagcggtatcgcttggttttcaattacttttgtaagaatacgagtaaaataagaaagccatttttcaattgtctgtttttgatagatatctgtattgaattcaaaatcaaagctgatggaaccgtcagacccttctgacgcgtaaagcgtggcatcaaactttgcggttttatgacttgtatccgcagcttgagccaaatgcagtttatttaacaccagggattcacgctccatattttggagcacaaacatcacatcaaacagcggattgcgactcatgtcccgctgcacgccgagccgttccaccagctcttcaaacgggtagtcctgatgctcatacgcctcaagcgcagcctggcggacttccgccaaataatcggtgaaccgtttgtcccctttcggctccgttctgatggcgagcgtgttgacgaacatgccgagaatcggttcaaggtctttgtgcgggcgcccggcaatcggcgagccgacgatgatgtcttcctgcccgctcaatctcgcgagtagcgtattgtacgcggcgagaagcaccatatacaaagtggagccgtgatcccgggtgatgcggtgaaggccggatgccgtttcagcgtcaagcgtgcacgatacgctgccgcccgcaaagcttctgacagccggacggggcttgtcagccggaagctcaagcaccggaagctctccttctagccgcttcagccaataggcttcctgcttctggtacccttctttctcctgaaatgaccgctgccagacggcatagtctttatattggaggctcatcggcgcaagcgaacggcctgcgtacagctcgccgaattctttaatcaaggtgttgacggacacaccgtcagaaataatatgatgcatatccgttaataaaagatggcgttcgcccgattctttcacgagggccgcacggaagagcggcgcttcctccagacaaaacggccggacgaatgcgtcagctgactcggcctcatcgagctgaaacggtacgctgtcatggatgcgctgcaccggttcgccgtcaggccccgtttcaaaggacgttctgagcgactcgtgccgctccacaagctgccggaacgtctcctccagccggacacggttaagcgggcccgtcagttccagcacagccggcatgttgtagccgacaccgccgtcttcaagctgctggagcacatacatccgcttctgcgccgaagacaccgggtaggtgtcctgtttttgcgcaggctgaatcgcttcatacgggctctcttccaagttctgaataaccgaagcgagctcttccaccgtcggccgggcgaagatgtcctgtaacggcacctgaacaccgaattctttggcgatgcgggagacgagagccgtcgcttttaacgaatggccgccccgctcaaaaaagtgatcccggatgccgacggggccgtttttcagcacctcttcccaaagagcgcaaagcttcatttccgtgacgttccgcggggcggtgtacgcctgtctgtctgccgctccgccgggagccggcaacgcgcggcggtcaagctttccgctcggcgtgaccggccattcgctcatctctataaactgagccggcatcatgtaagccggaaggcgtgtcgcaagctccgcccgcacgtcatcgctttcccgtccttcgatataggcgtaaagcgcggtttcgccgtgttcggtccgggcggtgacggccgcctcacgaatgccgtcgatgcgccggatcgccgcttcgatctctcccggttcaatccggtagccgcggactttcacctgtccgtctgaacgtccgagccattcgactaggccctcttctgtccagcgtgcgatatcgcccgtctgatacatgcgttctcccggataaaacggatcaacgacaaagcgctcctccgtcagctcagggcggttcagatagccccgggccacgccggtccctgcgatgtacagctctcctgccacgcccgcaggctggatggttcctccgctatctaatacatacagacgggcacccggaacgggttttccgatcggaagccttgtccgtccgctgtcccgttttcggtcacagacgtaaaacgccgcatcaaccgtcgcttccgtcggtccatagccgtgaataagcatggtctccggcagaagatcggcaaaccgggcagccgtaagcggggaaagagcttcccctccggcgaacacgcgtgtcagtgttctgccgaggcgtgttcttgtttccgcaggcactgtttccagcgcgtctaaaaagctgttgaccatcgccggaataaaatgcgcggtcgtcaccttttctgaggcaaacgcttcaatcatccgcacaggatctttctcccagccggccggaagcagatacacggaggcgcctgacatcgtccaccaaaacaattgccagatggaagcgtcgaaagaaaaggatgatttcagcacgataatatcctcttccgtcaacgggaactgcccttgcatccctgataaaaaggcggcggcctgacggtgttcaacagccactcccttcggtgttcccgtcgaaccggacgtataaatgatataagcgagcgaatcgctatccgcttcttcagagacagcccctgtctccgtctcgcctgtcagagcagaaagagacacttctagcgtttctccggaaaaaccggaaacggataatcccggctgtgcaagcaggagacaggcgccgctgtcatcgagcatatagcgcagcctgtcctcaggatactccgggtcaagcggcacgtaggcgccgcccgcttttaacacggcaagcactgaaaccaccatctccggcgagcgttcagcgagcacgccgaccatgctttctttgcggacgcctttttgtcggagccgagcggcgagcctgtccgtgtactgatcaagctcggcgtacgtcagcatgccgcccggaaaacggagcgccggacgatgcggcgaaagcgcggcgcggcgggcaaacagcccgtgaagcgtcggagccggcggttcaaccgcttctgtacggttaaacgcatccagcatatttctggcttcacacgcatcaagcaatgcgatctcggaggcgctcatttcagggtcggaaatgactgacttcatcatatgccgtaaaaatgtttcaatattcttcataaaaacacgatcgtatataccggtatcaaagtttaagcggatataaagagaatttcccggaatcacctttatgctgcatccgtagtttgtgacttcctccatcgagaaatcttctaccgcaaaatcaaatgaaccggcctgactcacattttcaatttcacgctgggccggcacattttcaaacacgataatgtggtcaaacagcgcttgcttcagagggctttgcgcctgaatgtcatacagcggataatagctgtacgcttctgcttgcagcgtctcctgctgcaaatgcctgacgagctccagaaaagaaaatgaaccgcttttcacccgcacgggaatcgtattaataaacagccccaccattttttccacgcctgcgagatccgacggccggccagaaacgacagaaccgaaaacggcgtcatcacagcggctgacacgctggagcaaaatgccccacagtgcctggaacactgtattcagcgttgctcccgcccttgccgcaatgttcttcagctcatttgtctgctcttcagaaatggtgaaaaccgcctgctcaagttcgccatttggttccgcggattttttcggaagagacgccgattgctcaagatcggcaagtctcgttttccaaaaaatctcggcttctttacgatcctgcttcatgagccatttaatatactttccatatggctgaacaggctcgagagacgggagccgtccgtctccgagagattgatagatcatcagaaattccttcatgacaattccgaagcaccagccgtccatgacgatatgatgatggctccagatacaaacatagcgttcaggcgcttttttcaaaatggagactctcatgagagggtctgattgcaaatcaaagcctttatctttatcttcttttctgaaccggtcggcatatttgtcttgcgccttctcgtccaaatgagaaatatcatgaaactgaacgcggctcggcctgtttttcaacacgacttggcggggcttcgccacattcttatgaataaatgtcgtacggaaaatatcgtatcgttcaaaaacagcatctatacttttttggaatcgttcccggtcaagctgtccgttgatcgtaaacaccgcttgttcgaagtaggctcttgagtcatgatccaacagagaatgaaaaagcatgccctcctgcataaaagataaaggatatatatcttgtatttccggttgctgccccattgcgccactccttttctatagtttgttgacggcccccataatgtcactcagatcttccagcgttaactcctcatcactgaaatcagcggcgctccattcacgctcctctttgcctgtgcaatgcgagatgatctgcttgagaaaggcatgaaaatatcccgtcaaaacttcaatcgtttctttttgatactgaaaacggttgtacacgacatacatgctgagacattccgacgatacggagccgctgatatcaagtgtgtacggacgttcccagtccgggctgacttcatttcccgcttttacgggagaaacaccaaagccgctggaacggatttcacggtcaaactgtcccagatagttaaaactgatttcaggagaatcggattccgtcttttcccagagtttgcttatatatttcagcactccgtatcccgctcctttatgcggaatgcggcgcatcatgtcttttgtccgcttaatgtgatagccgagccgctcgccgtcatcagcctgatcttgaagacttgcgtcaaccaataccggataaattgacgtaaaccaaccgatggttctgctgatatcaagatgctccaaatgctcttcccttccgtggccttccatgctgattttgaatgtctcgtttccggtccatctgttcagcgcaaggcttaacgcggcaagcaataattcacccgtctctgttgtgtatgctctgttcgcttccgttaacagctgctcagtctcctgtttcgtcaatgtaacggtcatcacatctgtatctttcagaagattggaagagatgcgggcatctttcggaagcggttcgaccgccgctctttctctttcggaccagtagtctgcttcctgtaacagccggcggctttttgcataatcagagatttgcttcgcgtaagtctgataggaatcggtttttgccggaagcgtggtttcttttccttcgagcgcctgcctgtagcacgcggtgagatcttcaaataaaatccgccatgacaccccgtcaatgacaaggtgatgaatggaaagcagcagatgatcgccatcattagcgtgaaataatccgacagctacgagcggacccgtctccagccgaatggaagtttgaatacgggcggccgcctgttcaattgcggcgtgctcctcttgtaatgaccctttccctctcacgtcatgcgtttcaaacgtaaagagttcttcttcagaaaggttttccgctctgttgtattgagtcaccgatccgttttgcgtgcagcataccatccgtaatgcgtcatgatgaaccgcaagctgtgccaacgcttttctcatagcagattcattgattctgtccgcactgcggagcataaccgactgattaaaatgatcatgcggcaatgattgcgaaaagaaccagtgctggatcggcgtcagcggcacgtctcccgtgacgggagcctgatcaatcacgcggcggactttccggagccgcatcgacacttctcccagtgtctgatgctcgaacagctcgcggacggtcgtttcatagccctgctgtttcagcctcgcacatacttgcagcgctttaatcgaatccccgccgagatggaagaaatgagcattggggccgaggccttcaacacctaagagttcttcccaaatgtcagccatcatttcttcagtttcaactctcaggctgatatcatctccaaggctatcatttaattcagtctgcgggagcgccttctcgtccagcttcccattcgccgtcagaggcagttcatcaagctctatcaagcgggcgggaatcatatattccggcagaaaagctctgagagaagcctgaatctctgcttcttttatcttttcgttcccgtgtaagaccgcgtatgcgtaaatggagtgctgaccgtgctgatcagcacgtgtgatcacggcggcctctttaacggaggaaagctcttgcagcgctgatttaatttctcccagttcaattctgtggcctctgacttttacttgcgcatctttccgcccgacatattccagctcgccatttgagagccttttggcgatatcacccgtccggtagagccgcatgccggaaatgtgcggattcgtgatgaaacgggaggcggttaaatcatccctgtttacatatcccctcgcgacgccttccccgccgatataaagctcaccgggaattccgatcggctgcggattcatataggcgtccataacaaaagcatggagggtttccagcggtctgccgatattgcttttgtttctctcaatatcatccatattcagttttttgcatgtgacgtgaaccgtggtttccgtaatgccgtacatattaacaagctctgtctccgggtacttctctttccagcttttcagcatgccgggctgaagcgcttctccgccgaaaatgacatatcgaagcttcagcttgtccgtatgcccggcctcttcatgaatgagtccggaaaaagccgtcggcgtttggttcaacaccgttacgccttcactttgcagcagctgccggtacaaatgcggatcacgggctgtgtctttcggcacgataactacctttccgccgtataagagcgcgccgaatatttcccagacagaaaaatcaaagcaataggaatggaacagcgtccagacgtcttcagagccgaaatcaaacggcagtcctttatgtgtgataaggctgatgacattgcggtgttccgtcataacgcctttcggttttccggttgtgcccgatgtataaatcacgtaagccggctgttcaggcgttatcatttctttcgttctgtctgctgaaacggattcaggcttatcgatgtataaaaccggcagcccgtccattccggatatcccaagacccgattgcgtcaacagaacacgcgcgccgctgtcagtcagcataaatgaaatccgctcgtccggatagtcaggatcaatcggcagataagctcctcccgcttttaaaataccgagaatcccaatcagcatatccggagatcgttcggtcataattccgacaatctgtccggagcggatgccgttttccgacagcatatcggcgattcgatccgccttttcattgagctcgcagtaggtgagacgctcatcggacataacggctgcaatttgatccggcattttttccgcctgtgcttcaaataaactgacaatcgtttcatgcctcggatactccgccgtttgattttccgcttgaagaagcatctgccgctcgtttatgcccagcaaatgaatgtcagacagcttccgctcatcatccgatgcgatttgtcctaaaagctctttaaaatgaccagcccaccgttcaatcgtatctttttcaaacaacgcggtactgtattcaaaatgaaaatccagtgagccatccggccgttcctcggcatgaagcgtcaagtcgaattttgaaatgtcatgcttcactgcatgtgaagaaacggataagcccggaaggttcacttcgaaatcatcactgttttgcaaaacgagcatggcatcaaacagcggattgcgattgacttcccggtgtgtatcaagcttttgggcaagttcttcaaacgggaagtcctgatgttcggccgcgccgagggcgagcattttcacctcttctaaataagcgcggaatgtcttatcccctttcggcctgcttctcattgccacggtatttacaaacatgccgatgaccccgtcaagctcagcgcggcttctgccggccgcaggtgaaccgacgacaatgtcttcctgcccgcccaatttagaaaggaacaaggagtagcttgccaaaagaatcatatacagtgtcgaacccgtctcatccatgagccggcgcaagttctccgccgtttccttttgaaggcgcgttcgaacaacggacccgctgaaatcaggaagctgcgggcgctttttatcgagcggcagatcaagaacgggaatgttttccccgatcgcatccagccaataacgctcatgtcttttgaattcttcagcggcaaaccgctcatgctgccagacggaaaaatctttgtactggagttttaacggccgcaactcctttcctctgtataaatccgtcaattcttgaatcagaacgctcattgacacaccgtctgcgataagatgatgcatatcaagcagcagaaaatgacgttcttcagtaactttggctaaagtcactctcaaaagaggcgctttttccacgtcaaacggtttgacgaaagtttccatcacctcttgaagaaggttcccggatggcatgtgaatctctgtgaggtcaagatcgacatgtgcatgtatgtgctgcatcggctccccgtttcgtaaaacaaatgaagtgcgtaacgcttcatgcctttgtaacagcgctgaaaaggcttcgtgcagacgatcccggttgagtctgccgctcagttccagacaagcgggcatatgatagcccgtactgtccgctgcaagctgatgaagggcatagagccttttttgcgcaaaagatagcgggtacaagtcctttgccacagcaggcgtgatttctgcatattctcctcttttcctctgttcaaggaagcgggccatgctctcgatggtcggatgttcaaaaacatggcggacggcaagttcaatttggagccgtttatgtatgtttgaaacaagcgacgcggctttcagcgactgtccgccgatttggaagaaatcatctctcatactgatatgttcccgtttcagcacttcttgccaaatagacagcagctcagtctcaagcattgtgcgcggagcttgataatcaccggttctctcagcttctttcggctcaggaagtgcggctcgatcaagttttccgctcacagacagcggcatttccgtcaatttcgtaaagcttcccggtatcatataagcaggtaatctcccggccaattcagcgtgcggtttaaatgtcacacccgcattttccagtacgacataagctgcaagctcctgttccccatccgccgttttgcgcacggtgactgccgcctcttttaccccggacagacttctgagtgccgtttcaatttctcctaattcaattctgtaacctcttatcttcacctgatcgtcaaagcgtcccatatattcaatcgttccatccggtaaaaatcgggctgcatctcccgttctgtacagccgttcaccttcacgaaacggatgaggggtaaagactttgtccgtcagctctttttgctgaaaatatccgtccgccagaccttttccggaaatacacagttcaccgacggctccgaccggctgcagccgatctccgtgcatcatatagacagaagtgttggcaatcgggcgcccgatcgtaatccggctgcttttttgcaggttgcgcagaatcgtcgtggccacactgttttccgtcggcccgtattcattcagcagctcggcattcgggcatatgccgcggctcgcttccacgatatcaggagtggccgcttccccggcaaatgtcaccgctcgaagcgtctgcgcatcctttttcgtcagcgaatcaagcagaacgcgatacagagacggaacgatcagaagatggctcactccgtggcgggtgattttctgttttattgaaaggacgtctttcgcatcatcttcatcagttaacaatacacaggcgcccgacagaagcggagtgaaaagactcgttaatgacccgtcaaatacgtatgaaaaaagatgaagcgctatgtctccttctgtcatcccgtattcttcacgccgccattgcaatgtattgctgatcgctttgtgttgtacaagcactcctttcggccggcctgtcgttccggaggtgtaaatgacatacgcccaatttccgctgtcagataccggcggaagcggtgcggtctgctgggaaaccgtttcctccatgatgacgacgctgcccttgaaatgcggcggaatgagggggagcaggtccttttcggtcacgagcagtgaggcttcactatctctcagtaaaaatgaaatccgttcaggcgggaattccgcatcaatcggcatataggcgctgcccgacttccaaattccgagcagagcggcaaccgtactcattgatcggcgcagcataacagcggtgatctggtcggggcgtgcgcctttttcccttaacgcatgcgcaatctgattcgcccgctgatttaatttcttgtagctccagcttactccgttatatctcaacgcctcttggtcaggcgtttttgccgcctgttcttcaaacagcccatgaacggttgtctcagggtatggacggttcgtttcgttaaacgaatgaatcaaggcttcttcctccggaggcacgagactgatgcttgataaaagcctgtccggatcttccgttacacaggagatgacctccagaagatgccctttgatccgtttcatgtcttcccgatcgtagatgcccgcattgtagctgaatttcacataaaactcttctcccggaacgatgacgacgttaagatcgtaattggtttcttccgccatcgaaaagttttcaagtgagagcgcactgctttccgtttgcttccagccgtttaccgcagtctgcatctgaaccggataattctcaaaaaccaggatgtggttcaagagatctttttgcaggccgctctcgttttggatgtcatacagcggataatagctgtgctcttccgcagcgagtgactctttttgcacctttttgagaagagaagaaaaagtcatatccccagccgcgcgcacccttaccggcacggtattgataaacagtccggccatggattcgatgccggcgatagctgacggcctgccggaaacaactgaaccgaataccgcatcttcagtcccgttgtaacgatggagaagcagcccccaaatgcccgtaaatatagtattcagcgtgaccccgatgcttcgggcaatgtctgtcagcttttgcacggtttcagactcaagggaaaattgaaaatgctcagatgcataaccgttttgcgccggcttattcttcgtttgcggaacggaaacgacttctccgtaatcttccaagcagcgcgaccagaacgctgacgtttcttctttattccggcttcggagccatttgatataagagctgtaaggagccggactgccgaggtttacaggcagcccgtttcggatcgcataatacatgctgaagaaatctttcagcacaatgcccaagctccagccgtccatcataatgtgatggtgagtccaaacgcatgtatggcggttttctcccgtttgaaaaagagtcaggcgcattaaggggcctttttgcagatcaaagcccttattccggtcggtttccttgaattccttcatgatgctttgctgccgttcttccgaatagtctgaaatgttctcagtctgtacggctgtgtcacggcgtgaaagaacaacctgctgcggtccttcaaggtcaggcacttcttttatgaaaatcgttctgaaaatatcataacggctgataagcatatccagacttttttggaatgtatcaatgcataaatccccgctgactgtaaacgaaatctgctcgacatatgcgtttgatccggaatccagaagcgaatgaaacagcatgccttcctgcatatatgataaagggtaaatatcttgaatttctgtcgcttgtgtcacgaatgccacacacctttttatgaaattaaagtccttttacgagatcctcaatgcttgatagtgcttgagcggtcaattctgtatggctgtaatccgttaatgttttttcccgctctttcttgccggaacagtgggcgatgatgtcctcgatgtgagtatggaaacgattcatgaagaactcgattgcccccggtgcaaatacatcggtataaacggcttttacctccagttgcccggccgccaccatcgcgttaatatccagatcaaactcgcggatgcgcccggccgctatatcgtgctgcggcttgaacggtgacatcttcagtgtcccttcaagaccgtcaaacgcaccgagatagttaaagcttatttctgggtctttataaagaatgtttcgcgaatatctcagcagcccgtagccggttccgtgatgaggaacccgtctcatcatgtcttttaccgtctttatgcggtgagcggttttttcgcctgagcctcccggcactctcatatccaaaagcaccgggtaaacagatgtaaaccatcctgccgttcttgacatatcaatgtcaggcatatgcccctggcgcccgtgcccctcagtgctgataaggatctgttcagaacccgtccactcatgaagcgccattccaagcgccgttaaaagcaattcatgaacatccgttccgtatgcctgctgtgtttccaacagcagctgtttcgtgacttcgctgcttaatatccacgatgcagtgcgcgcgttttcctgcaatcgtccggcgttttcatcagttattttcggcagcggcgctgtttcactagacatcacgctgtcccagtatgcggcttcctccagcaatgctttgcttttggcaatgtcaaaaagttcttcggcatactttatataagaatcgcttttcggcggcagttcaatttgtttgccgtccaatgcctgctgataagctgtctgcagatcttcaagcaatatcctccatgacacgccgtccacgataagatgatgaatcgttataagaagatggtcggcttccttctgacggaacactccgagatgaagcagaggcccctgatcaagacgcatagcctgctgtatttctttttcctcagcggctatccgtttttcgggctgcgtttcttctgaaagatctatgacgttaagcgtaaatatttcttcatactgctttgtgattccgcgattatattgaaccgtttccccatgctcattttcagtgaaagtcattcgcagcgcatcatgatgttcggtcagcgcgcaaaccgcctgatacagcgcatctatttcgaggctgtcttcactgcacagcatgaccgcttggttataatgaagctcaaacgcacccggctcctcaaaaaatctctgctggatcggtgtcagcggagcgcttccttctatcggcccctgatcagcagttgcaacagccggcgtgaggtgcttcgcgagttctgcaatcgtcgggaattgaaacaaatcgcggatcgacatgttccagccttctccggcgagtcgggctgacacttgaagcgccttaatggaatctcccccaagctcaaagaaagagtgatggattcccgctttctgaatatgaagcacatcttcccaaatccggcataacatcacctgtttttcatcgccgggcgcgacaaatgcctgggatgaatgtatctcttctgccggcaatgccgatttatcaagtttgccgttcagtgtcaggggcatgctgtctaaaccgataatatgggacggcatcatataagccgggagttcctgcattagagactggcgaagtgatgagatatcggcctctttaggaacgatgtatgccgctaatcgggcttgtccttcggcatctttcatcacggtaacagccgcttctttgacttgatcgtgtttcaaaagcacactttctatttctcccgtctcaattctgtagcctctgatttttacctgcttatcaatccgcccttgaaaacgaagagtaccatccggcagccagcaagcctgatctccggttctgtaaagcgtttctcccgtttgtaacgggtcactgaatgcgccctctgtcagctcaggctgtccccaatatcctttggcgacgccggcccctccgatatacagctctccgaaaacgccgatcggctggacctgtttgtctttgtttaagacgtacatttgtacattcggaagcggaacaccgatcggcacatcatcttcccgcggcttttcgctcatttcggcttcataatacgaagaatctattgtcgcttctgttacaccgtagctgttaatgatccgcatttcttttccgaagcgttcatgaagcgtataaaaatcttgcgacttgatcatatctgaacccagtaccagtatttttacactttgcagcgcgagcttccggcgatatatatattccataaacggaacaatcagcgcgggtgtcgactccataaacgtgatacggtgctgatcaatgagccgataaagctgttgcggctcaagccggacgtcatccggacaaatgacaagcgttcccccgtttagcagggcgcgtgcaagatctcctgaaaatacatcaaatgagaaactcgccatctgcagcactctgaccggtataagatcaagctcataaatcctgcgccatgcaagtgctgcatgcgtaaagctgcgatttctgacttcgactcccttcggcgttcccgttgttcccgaagtatatatgatatatgcagtatcatccggtgacgctgccggctgaatattctttgcacaaatatcgtattgatcttcatgatcaagctgaatgagaaataaattgtgatccgtcagctgtgaagcaagttctttgtattctgactgcaccatcaagacggatgccgcgctgtcttttaataaatagcgaatccgttcctcaggataatgggagtcaaccggtatatacgcccctcccgatttcatgacggcaagaacactgacgattgcttcaatcgaacggtttgccaatatagctgctctttttcccggaccgaatccatttttgtgtaatgttcgcgcaagccgatttgcccgctcattaagctgcgaatagctgatctgttgtgttccttcaataacagcggtctgatgaggcgtttcttctgctttctcttcaaacaactggtgaaacagtttgtgtttttccatgaattcagtttgtgtgttattaaactcaatcagtaacttttgtttttcttcttcatccaaaatgtcagctttcgatagtgtgacttccggttcggcggcaacatggcgcaagagattcagtaagtggcccatccagcgttcaatcgtttctttcataaaaagctcggtgctgaattccatttcaaagcggatgtttccatcggattcagccgctgataaggtcaggtcaaaacttgatacatcatgttcggtatgttctgatcgtgacaccttcagaccggccagatttatctcttctcgctccatattctgaagaataaacatcgcatcaaacagcggattgcggctcatgtcccgctgcacgccgagccgttccactagctcttcaaacggatagtcctgatgctcatacgcctcaagcgccgcctggcggacttccgccaagtaatcggtaaaccgtttgtctcctttcggctccgttctgatggccagcgtgttgacgaacatgccgagaatcggttcaaggtctttgtgcgggcgcccggcaatcggcgagccgacgatgatgtcttcctgcccgctcaatctcgcgagtaacgtattgtacgcggcgagaagcaccatatacaaagtggagccgtgatcccgggcgatgcggtgaaggccggatgccgtttcagcgtcaagcgtgcacgatatgctgccgcccgcaaagcttctgacagccggacggggcttgtcagccggaagctcaagcaccggaagctctccttcaagccgcttcagccaataggcttcctgcttctggtacccttctttctcctgaaatgaccgctgccagacggcatagtctttatattgaaggcgcatcggcgcaagcgaacggcctgcgtacagctcgccgaattctttaatcaaggtgttgacggacacaccgtcagaaataatatgatgcatatccgttaataatagatggcgttcgtctgattctttcacgagagccgcacggaagagcggcgcttcctccagacaaaacggccggacgaatgcgtcagctgactcggcctcatccagctgaaacggtacgctgtcatggatgcgctgcaccggttcgccgtcaggccccgtttcaaaggacgttctgagcgactcgtgccgctccacaagctgccggaacgtctcctccagccggacacggttaagcgggcccgtcagttccagcacagccggcatgttgtagccgacaccgccgtcttcaagctgctggagcacatacatccgcttctgcgccgaagacaccgggtaggtgtcctgtttttgcgcaggctgaatcgcttcatacgggctctcttccaagttctgaataaccgaagcgagctcttccaccgtcggccgggcgaagatgtcctgtaacggcacctgaacaccgaattctttggcgatgcgggagacgagagccgtcgcttttaacgaatggccgccccgctcaaaaaagtgatcccggatgccgacggggccgtttttcagcacctcttcccaaagggcgcaaagcttcatttccgtgacgttccgcggggcggtgtacgcccgtctgtctgccgctccgccgggagccggcagcgcgcggcggtcaagctttccgctcggtgtgaccggccattcggccatctttatgaactgagccggcatcatgtaagccggaaggcgtgtcgcaagctccgcccgcacatcatcactttcccgtccttcaatataggcgtaaagcgcggtttcgccgtgttcggtccgggcggtgaccgccgcctcacgaatgccgtcgatgcgccggatcgccgcttcgatctctcccggttcaatccggtagccgcggactttcacctgtccgtctgaacgtccgagccattcgactaggccgtcttctgtccagcgtgcgatatcgcccgtctgatacatgcgctctcccggataaaacggatcatcgagaaaacgctcctccgtcagctcgggccggttcagatagccccgggccacccctgtccccgcgatgtacagctctcctgccacgcccgcaggctggatggttcctccgctatctaatacatacagacgggcacccggaacgggtttaccaatcggaagccgcgtccgtccgctgtcccgttttcggtcacagacgtaaaacgccgcatccaccgtcgcttccgtcggcccgtagccgtgaatgagcacggtctccggcagaagatcggcaaaccgggcagccgtaagcggtgaaagagcttcgcctccggcaaacacgcgtgtcaaggttctgccgaggcgtgttcttgtttccgcaggctctgtttccagcgcgtctaaaaagctgttgaccatcgccggaataaaatgcgcggtcgtcaccttttctgaggcaaacgcttcaatcatccgcacaggatctttctcccagccggccggaagcagatacacggaggcgcctgacatcgtccaccaaaacaattgccagatggaagcgtcgaaagaaaaggatgatttcagcacgataatatcctcttccgtcaacgggaactgcccttgcatccctgataaaaaggcggcggcctgacggtgttcaacagccactcccttcggtgttcccgtcgaaccggacgtataaatgatataagcgagcgaatcgctatccgcttcttcagagacagcccctgtctccgtctcgcctgtcagagcagaaagagacacttctagcgtttctccggaaaaaccggaaacggataatcccggctgtgcaagcaggagacaggcgccgctgtcatcgagcatatagcgcagcctgtcctcaggatactccgggtcaagcggcacgtaggcgccgcccgcttttaacacggcaagcactgaaaccaccatctccggcgagcgttcagcgagcacgccgaccatgctttctttgcggacgcctttttgtcggagccaaacagcgagtctgtctgtgtactggtcaagctcggcgtacgtcagcataccgcccggaaaacgaagcgccggacgatgcggcgaaagcgcggcacggcgggtgaacagcccgtgaagcgtcggagccggcggttcaaccgcttctgtacggttaaacgaagataacacccgtttcttttctttttcatccgccatatcaatatgccgaatcagccggtctggatttctaacggcattttcaacgatcgtcagcaaatgagtttgaatgcgtttaattgatgtttcagtaaataaagcggattggtaatcaaaattcagctcaatcaatcccgtatctgtccgctccttaattaaaatggagagctcgtttgcggtatgtccgctgaaaaacatggccgtttcataatcgaaaccgtctgccttacgccactcaagcggctgatactgcatcgaaataccgatgatattttgcaggtcatgatgagtctgccttaattcattcacaaaaagattgtaaggatatttctggtgccgcataacagacagctgctcttttcctacgctgcggacaaaggacaggaactctgcatcaggatctgccgtcattctgatcggcagtgtgctgacgaacatgccgagcatatccttttcgagcctggagccccggtttccgtaataagtgccgatggcaatatcctttttagccgtcagacggctgatgcatatgtataacgaagccataaacagagagatgatgctgatattattttctttgcaaaaaagccggattgattgttctaaggagtgagaaagagtgatagtatctctggaagccgcagtgctttgtctaagatgagaggttcgttccgccagtgaaaggtgttccggaacggttcggtatgtttcagtccaaaatgaacggtctttttgaaaacgggaagactgtaagtattgctgttctttttccatgtagctgagataggaaggtctgtggtgttcagttaaatcctcgctccgcatgatcttttggtagatatcaatgagctggttgccgagcaggttgagcgagatgccgtccatgataatatggtgaaattttgaataaagccaaacttcttcgtctgacatgacaagcagagtaaattgatacagaggtgaatgaaacagcttgaacggaacacgggtctgcgtgtcaatccatgcgtcccgctctgcctgatcagtatgagtaaaatcaacagtctctagagaaatcggccgatgccccgcaagatacagctggggttctgatccgtccccttctgtcagttgaaacctgagcgaatcattttgcgagatagaaaaatctaaagcatggcgcagtacgtcaaaatcgatgtcccccctgaatttgacgcatgccgcgagattgcagatacttgtgcccggttcgagcagctccgtaaaccacactcttctttgtgcgtgagttaaagaataaacagtgttctccaatggaatccctccgcttcaatttaagaggataagaaagtgaaataattacaattaaatttcgacagcatatgacttaatcatccatataagcattattttaaaacatattttagaaatcacaataaaaaattaaattttctctaacattttttagaatatagtatatattcctcacttcacttcttcatttctataatctttataccatgtaaaacggtatgtatgcatactgtaaactggttcttaaacactataataaggaataaaatgtataattaattgcgcttttaaaaaggttttcctcccgaaaagaagttttatgttaaaaaatgaataatcggtgaacatgtaagaaagcggcatgtaaaaaaaaggaaggatattgccgatattactttttgaaaagattgattcataatcgcaatataatgttttacagacatcaaaaaaagccgaatcctctaaggattcggcccttcttattgatttgccagcacgactgcgattttgtcttcaatgtcttttccgtcatcttcgtcaagcagcccgttttgaagcacggaaaaaataagcgtatctcctgtttttgtgtctgcatagccggcaatcgaactgactgatgttagtgacccggttttcgctttaattttgccctctgccggagtattcttcagccggttccgaagagtgcctcccgtcattctgtcgcttgcaccggcgacagggagcgaacgaaggaaagccgggtaccacttttctttctgaaccgcatacaaaagctctccgatttgaccggcggatacgccgttaatatgagaaacgccggatccgtctcttgcaatcaatttatccggattgagcccgaacgatttgagctccgatttcatcacgtccaagcccttttcccagctgccctccccttttttcacttttcccatttccttgatcagaatttcggcgtgcccgttgttgctcagtttcataaacgggatcaataattctgaaagaggcatggatgtccgtgatgtgacgagctgggtgcggtgcggcattcgccctgttctgattttcccttttacagttataccctgtttagtaagcgcttgtttccataaatctaaagcataggacgacggatcccacactgccgcccattctcttgcctttgccgagccggcaggtatggttccctttatcgtaatcacattgccgccgtgctcccgttcaaccgtcaattctttcgcttcatcagaagcgacggttttcacttcatttttcacacgaacgacgtccgtatggggggaaatcgaaatgcgcggctttttaccgggctgttttgccgggctgatttccgcaatcaccgttccggtatcataatcctcatttggggaagcggtaagagctgatacttgcgcgccataatattggccttcatcactccacggaagatcaactgaatacctggtatcgtcataccacgaatcatccccgatcagatctcctttaatgacatggatgcctctggctttgacctgtttagccatcttctcaaaatcagaagccaatagggtcggatcgccttttcccctgagataaaggtttccgcgcagctgttttcctttcacggcgccgtctgcccgtacttctgtcttaaaggtgtaatcttctccgagaacggaaagcgccgcagatgccgtcagcagcttcatcagtgatgcaggcctcagccgcatatcttcccggctgccgaacagcacctcccctgtttttgctgaccggacactgacgcccgctgaaactccctttaaagcaggttcttcatccagaatgtgttccagctctttttgcaaagtatttttttgttcagccgccttagccgcctcatcaatataaggaactgcggcaatgaccaaaagcagaatcaccgcgcacaagcgtttcacatatgttttcaatgttatcccgcctctttcctattcttcgtcatgcaaaatggtgatcctggatgacgcagccgcttcttcgcccggtttcagaatctgaagccctgtcagtgatgcaggctgattcagattaaatgcatctgtaacggaagtataaggctcaagactgacaaacccctgctttccgtcaccgttatataccacccaatgcttgaaagacgtgtctgcttgatacaaaacggataattgctcatccggatgataaataacagcttcattattgccgccattccgtccggaagaaagaaaaacatcgtcaaactgtttatttttcaaagacatcccatgacggaacgcttctttatcaggaacatccaataaacggcccgtcggcacgaaacgttcatttaattcccacatgcggtcagccgtcaaaaatagacgggatcgctcttcattgaaaacaaaagttgaatgatagccgagcccccaaggaaaagcctccgttcccttattcataatcagcgcccgctgcgtaaacacattgtcttttaatgtataggtcatccggacaatgacatcgtgcggaaattgtttatgaacacggggaatctttgaaagatcaatttctgtttcgactttcattccatccccctcttctttcgctgccgtcgctttccaatgctgattgtgaagaaagccgtgaatatgattatgtttatcctcttcgtttatctcaaattgatacgcgcggccgtcaaaacgaaacgtcccatccgtaatccggttcggcgggaataaaacgggaatgccgtacagcatcggttttttgcggaattgctccgcagtttccggttctctcagaagccgcataccggttcttttatcccgaagcgatatgacatttgatccccactccggcacaatgatgcattcagcctgatcagtctccgcttttatggctgaagcccctaaataagtcgtatgttcaatcgtcataagcacctgccctttccttgttttctagcatgtataggaattccattttctaaactcattttccttctctaaaaaaaacatcgcccgtatgaactgagcgatgtgcggtaaaaccttattgaatcagccgggtaatctgttttttcttccatacaaaccggtaatatccgtattgcagcagcaggctgacgacaaaagccgccggataaccgacccaaatgccgagaatgccgagattcgtataatgagaaagaataaaggccacaggcacttcaattccccaaatcgcaaaaatactgataatcgtcggccataacaccgtaccgctcgcccgcattgtcgctgaaacgatctgagcgtgaccgaaaatcaaatagctccaaagggtaatcataatcagattgcgggcaatgtggagtgtatcctgatctgttaaaaacaaagcaagtatctgccgggagaaggtgtaaatcagcacaatcaaaaccccgccgatcaaataattcaggccgatgccgactttgatgacctgtttcagccggccgaattgattggcgccaatggattgggcggcaaaaatggaaacggcgataccgaggcttaccgccggcatctgcacataactcgccacttggttgacgaccccgtaagcagccgtcgcgtttgatccgtaatgattgacaaatgaaatgaccgcaatttcagaaagtgacacgagaatcatattgatgctcgacggaataccgagacggagtaaaagcgcgagcagctttttgtccattttaagagaacggagcgcagtccggtcaaatgccaatggatgtttccttttccgcaaataaaccatgagtacgataaatgtcacgatgtttgaaatcacggttgcatacgccgaaccgtaaatgccgaacttcggaagtccgaaaagcccgagaatcaataagggcaagagcccgatgtttatgactgtactgacgattaacgtataaaacggagtctttgaatctcccgttccgcgtaaaaatgtcgtatacgcaaaatataaaaacatcagcggcattgcgcaaaacaaaatgcgcgcatatcggacactgacatctattacgttttccggcgttcccatcagccgcagaatatcaagcgtaaacacactgccgacaactgccaggacaacaccgagcataaaggtaaaagtcagtgtagtgccgacaatcgccttcatcctctcttcgtttttcgcgccgtaagcctgcccgatcagaatggaacttcccgaaccgattccgatcgtaaaggagatcagcagaaaaaacagcggaaaaaaagacgatacagcggcaagcgcatcgactccgagccaccttccgacaaataccattccgaccaattggccgacagattgcaatacattgcttaaaagcagcggcactaaaaacagtgacatcgatcgccagactgactggccgcggccttccgctgtttctaaatgatcttgtacttccatatgtaggactccttttttgattttcttccattttattattcagcagacagcttgtaaaaaccttttgttcaatgaaactctttatctttttctcacgtcttacatggaaataaaccataaaaataaaaagtccggaaaatatttctgaaaaggtattgtaatcttaccgtaattattgtaacatttgtaacataagagaaagagattgattgaaggagagattatatcatgaaaaaatggctattattcctcactactattacattgattctgtcattgggcactgcggcgaccgcaaaaaatgcacctaatgaccttacacaaaaacaagcacttcagctggccctgtcagcgagagaacatttctggaacacaatgagcggcggtgcgcttaaatcaaacgcaaattgcacatctgaaccgtttgaatatcaaaatctgcaatatgtatttatgtgcaaagacctcggaacaaaagcgaaagccgtaaaatatctgacacccgcttttacaaagcaagcgattgacaaagggctcaaagattaccacttcactgtaaaagacggcaaattggctgttccggtcggcgacggagataacctcctgaattggaaaaaagcaaaaatgacccttctttctaaaaaaggaagcgtccaaacataccgcttcactgtaccgactcttgacggttctccgtcagcaaaacgcgatgtaacattcgtaaaagaaaacaacgtttggaaagtcaatcaatttgatgctgtcatataaggaaaaagcccgcttgcttacagcgggcttttttcaatgatatgctggcatattataacggaaggctgtttttcagaagcagttgacggttaagaagtaagaagataaacgaatacccttgatttttttaaaaaacaccacggccgcaaaaacacttgcatagcaatgtgcaagatttgtgtaaaacataataaaatcacatcatttccatcaggttttcacaaaatattcaactcaaaacccccttgtataacaagggggtttctgttttaccgacattattaagctgcgcctatctcatacaaaaacgctctaggagaacgtacaacatacctctatatacgttgatatataaggtttcctgacaaaacttgtgctaaatttgtgtaaaatattttaagtgtttttatctgtgcaaatttcgaattcttaaagaaattcattttactctgagttttaacgtggtaaaattttgaataatattttatcgcgaaaggatatgattatgaaaatctttgaagcaaccaccctgctttctgccgctaaacaacgcgcaaacgaatacaaagaactccgcggccagatggttaacctgaaaaaagcatttcaaggcatggctgacctcggtgacagcgatttctcaggccgaggcgcagacaatatcaaagcctttttccaggaccacgccggcgtcacagacagctggcttgatctgatcgatatgaaaatcgcatttctcacaagccttcccggcaaggtcgaagacgccggactttccaattcgcatgtggaggaatcatttctggagcacgagctcacccacgccctcagtaaatcaaaggcgattatggaagagcagaaaaaggacatgcgctttatcctcggagagatagaagacatcatctcgcttgatctgttttcaaccgaaagcacagatcagaagctttcttcagctgacaaaaaaagaagcgaaacgatacataaactcggcaagcttgatcacgatctaacgaaagaatacgcagaaaccgaagcaaacgaacaattcctccaagccgactttcagcagctccaaaacgcgacgggcaaaggaaaaagcgcaactccgcttcattacaatgccaaggcgtaccgtgaaagcgacatccataagaaaaaaagcgatatcgcaagacattcggatgcttatttgacgattaaaaaggaagaagcgaaagagcgagaaattgaaaaactaaaagaaagactgaaaaactatgattatgcgaatgccgatgagttctactcaatggctaaaacaatcggctatgaaaacctgacaaaagaacagcagcgttatttcactcaaattgaaaacacgcaagaactcacagacggtttcaaaggggttgcagtcggcctttatgatgttgggaaagatactgtgttaggtctgaaagacctcgctgtcggcgcctgggacttttatcagctctctgatgaacaaaaggttgttaaaacgatttctaccgtattgaatactccgtcttacgcaaaaatcatatggacaaacctagccgattcgtggaatgatcaaatggtgaatggtgatacgtactctcgagcgcactatgtctcctatgcggtgggcagccttgtcggcctgaaaggtgtgggctcgacggttaaagtatcaaacaaactcgcaaaaacaggattctccaaggtgggaaaattattggagcctggcgctgcaagccatgtacacacaggaataaaaaacggaacagactatatcaactctttattgaaaaataaaaacgaacctgcccttgttggaatagcaaaagatattgaaaacacccataatgtaaaaaacaccccgcttttaaagaaagaaattcaaaaaaagcaagatatgctgacacaggccgcgccgttcacacataaagatgcctttggaaatacagtaacaactaacttaaaaaatggtcatttaaaaaatgatgtgcatcctataacaggtataccctatgataaagatggttttccaatatttgagcccgttgcagaagtgaaaattgataagtcattatatcttgaaaaagatactgtacagtttaaaaaagcaaccgaactcctgttgcaagaaatcaacaaaaaccccgagttgaaaaatcactttacagaaatgcagttgaagcaaattttaaaagggaaaaaaccaaaagggtttacgtggcatcatcatcaaaatgaaggtataatgcagctagttgattcagatatacatggtaaaacaggtcacactggtggaagaaacatctggggcggaggttccgaatacagataaaaggagagtaataacatggttgaatgggatttcggagaacatcctatcagtaacgaagaaattcaagaagtagaaaatacgctacaagtaaagttcccaaaagattacttagaatatgtcaaaagttattctggcgcaacaccaactcctgagacttttgattttgaaggaagaaaagggattgctttcggatacttacatagttttcatgaggatagtgagtcatacataattaacgtttctaatcgttatcgagacggcagaatgcctgataaagtaattcctattgcggatgatgtgtttggtaatgagatctgtttcgattttagaaagaatcatagtaatccccctcttgttttttgggatcatgaaattgcatttgaaaatccagagggggctctgagtcatatatgtaattcgtttacggaattggtagataagctctacgaagaatagaaacaaaaagtccatataaacaaagcccttcccttttgagaagggttttttgttatttcgataatatttccagtattgcttttgtcttcggttcgcaattccaattattatcaaatcctttacaaagcatagaaatgaatcctcctttgctttaaaatgtaaacattcgttttaaaataagagggggatcatatgattattcttggtattgttgcaacattagcaaccattgtctttattacagcattgatttttatcttctttgaaaaaactaagaaaataggtaaacaaatagctccaataagccttgttttggctttatctcttttttttattatggttacgttaaatcgagattctcacaaatccaaaaccgaggatgtcactg
